United States Patent Application Publication US 2026/0263501 A1, published September 10, 2026 (application 19/679,108).

The application's sequence listing, which the Patent Office published only in electronic form, follows.

SEQUENCE LISTING (3813 sequences)

SEQ ID NO: 1 - protein, 167 aa, Escherichia coli
  REGION 1..167: note = misc_feature - TadA*7.10 (ecTadA) polypeptide sequence
MSEVEFSHEYWMRHALTLAKRARDEREVPVGAVLVLNNRVIGEGWNRAIGLHDPTAHAEIMALRQGGLVMQNYRLIDATLYVTFEPCVMCAGAMIHSRIGRVVFGVRNAKTGAAGSLMDVLHYPGMNHRVEITEGILADECAALLCYFFRMPRQVFNAQKKAQSSTD

SEQ ID NO: 2 - DNA, 4092 bp, synthetic construct
  misc_feature 1..4092: note = BhCas12b GGSGGS-ABE8-Xten20at P153 polynucleotide sequence
  misc_feature 1..6: note = Kozak sequence
  misc_feature 7..57: note = Sequence encoding N-terminal nuclear localization signal
  misc_feature 58..513: note = Sequence encoding BhCas12b
  misc_feature 514..531: note = Sequence encoding a linker
  misc_feature 532..1029: note = Sequence encoding TadA*8
  misc_feature 1030..1089: note = Sequence encoding Xten20 linker
  misc_feature 1090..3954: note = Sequence encoding BhCas12b
  misc_feature 3955..4002: note = Sequence encoding C-terminal NLS
  misc_feature 4003..4008: note = Sequence encoding GS linker
  misc_feature 4009..4089: note = Sequence encoding 3x hemagglutinin (HA) tag
  source 1..4092: mol_type = other DNA
gccaccatggccccaaagaagaagcggaaggtcggtatccacggagtcccagcagccgccaccagatccttcatcctgaagatcgagcccaacgaggaagtgaagaaaggcctctggaaaacccacgaggtgctgaaccacggaatcgcctactacatgaatatcctgaagctgatccggcaagaggccatctacgagcaccacgagcaggaccccaagaatcccaagaaggtgtccaaggccgagatccaggccgagctgtgggatttcgtgctgaagatgcagaagtgcaacagcttcacacacgaggtggacaaggacgaggtgttcaacatcctgagagagctgtacgaggaactggtgcccagcagcgtggaaaagaagggcgaagccaaccagctgagcaacaagtttctgtaccctctggtggaccccaacagccagtctggaaagggaacagccagcagcggcagaaagcccagatggtacaacctgaagattgccggcgatcccggaggctctggaggaagctccgaagtcgagttttcccatgagtactggatgagacacgcattgactctcgcaaagagggctcgagatgaacgcgaggtgcccgtgggggcagtactcgtgctcaacaatcgcgtaatcggcgaaggttggaatagggcaatcggactccacgaccccactgcacatgcggaaatcatggcccttcgacagggagggcttgtgatgcagaattatcgactttatgatgcgacgctgtacgtcacgtttgaaccttgcgtaatgtgcgcgggagctatgattcactcccgcattggacgagttgtattcggtgttcgcaacgccaagacgggtgccgcaggttcactgatggacgtgctgcatcatccaggcatgaaccaccgggtagaaatcacagaaggcatattggcggacgaatgtgcggcgctgttgtgtcgtttttttcgcatgcccaggcgggtctttaacgcccagaaaaaagcacaatcctctactgacggctcttctggatctgaaacacctggcacaagcgagagcgccacccctgagagctctggctcctgggaagaagagaagaagaagtgggaagaagataagaaaaaggacccgctggccaagatcctgggcaagctggctgagtacggactgatccctctgttcatcccctacaccgacagcaacgagcccatcgtgaaagaaatcaagtggatggaaaagtcccggaaccagagcgtgcggcggctggataaggacatgttcattcaggccctggaacggttcctgagctgggagagctggaacctgaaagtgaaagaggaatacgagaaggtcgagaaagagtacaagaccctggaagagaggatcaaagaggacatccaggctctgaaggctctggaacagtatgagaaagagcggcaagaacagctgctgcgggacaccctgaacaccaacgagtaccggctgagcaagagaggccttagaggctggcgggaaatcatccagaaatggctgaaaatggacgagaacgagccctccgagaagtacctggaagtgttcaaggactaccagcggaagcaccctagagaggccggcgattacagcgtgtacgagttcctgtccaagaaagagaaccacttcatctggcggaatcaccctgagtacccctacctgtacgccaccttctgcgagatcgacaagaaaaagaaggacgccaagcagcaggccaccttcacactggccgatcctatcaatcaccctctgtgggtccgattcgaggaaagaagcggcagcaacctgaacaagtacagaatcctgaccgagcagctgcacaccgagaagctgaagaaaaagctgacagtgcagctggaccggctgatctaccctacagaatctggcggctgggaagagaagggcaaagtggacattgtgctgctgcccagccggcagttctacaaccagatcttcctggacatcgaggaaaagggcaagcacgccttcacctacaaggatgagagcatcaagttccctctgaagggcacactcggcggagccagagtgcagttcgacagagatcacctgagaagataccctcacaaggtggaaagcggcaacgtgggcagaatctacttcaacatgaccgtgaacatcgagcctacagagtccccagtgtccaagtctctgaagatccaccgggacgacttccccaaggtggtcaacttcaagcccaaagaactgaccgagtggatcaaggacagcaagggcaagaaactgaagtccggcatcgagtccctggaaatcggcctgagagtgatgagcatcgacctgggacagagacaggccgctgccgcctctattttcgaggtggtggatcagaagcccgacatcgaaggcaagctgtttttcccaatcaagggcaccgagctgtatgccgtgcacagagccagcttcaacatcaagctgcccggcgagacactggtcaagagcagagaagtgctgcggaaggccagagaggacaatctgaaactgatgaaccagaagctcaacttcctgcggaacgtgctgcacttccagcagttcgaggacatcaccgagagagagaagcgggtcaccaagtggatcagcagacaagagaacagcgacgtgcccctggtgtaccaggatgagctgatccagatccgcgagctgatgtacaagccttacaaggactgggtcgccttcctgaagcagctccacaagagactggaagtcgagatcggcaaagaagtgaagcactggcggaagtccctgagcgacggaagaaagggcctgtacggcatctccctgaagaacatcgacgagatcgatcggacccggaagttcctgctgagatggtccctgaggcctaccgaacctggcgaagtgcgtagactggaacccggccagagattcgccatcgaccagctgaatcacctgaacgccctgaaagaagatcggctgaagaagatggccaacaccatcatcatgcacgccctgggctactgctacgacgtgcggaagaagaaatggcaggctaagaaccccgcctgccagatcatcctgttcgaggatctgagcaactacaacccctacgaggaaaggtcccgcttcgagaacagcaagctcatgaagtggtccagacgcgagatccccagacaggttgcactgcagggcgagatctatggcctgcaagtgggagaagtgggcgctcagttcagcagcagattccacgccaagacaggcagccctggcatcagatgtagcgtcgtgaccaaagagaagctgcaggacaatcggttcttcaagaatctgcagagagagggcagactgaccctggacaaaatcgccgtgctgaaagagggcgatctgtacccagacaaaggcggcgagaagttcatcagcctgagcaaggatcggaagtgcgtgaccacacacgccgacatcaacgccgctcagaacctgcagaagcggttctggacaagaacccacggcttctacaaggtgtactgcaaggcctaccaggtggacggccagaccgtgtacatccctgagagcaaggaccagaagcagaagatcatcgaagagttcggcgagggctacttcattctgaaggacggggtgtacgaatgggtcaacgccggcaagctgaaaatcaagaagggcagctccaagcagagcagcagcgagctggtggatagcgacatcctgaaagacagcttcgacctggcctccgagctgaaaggcgaaaagctgatgctgtacagggaccccagcggcaatgtgttccccagcgacaaatggatggccgctggcgtgttcttcggaaagctggaacgcatcctgatcagcaagctgaccaaccagtactccatcagcaccatcgaggacgacagcagcaagcagtctatgaaaaggccggcggccacgaaaaaggccggccaggcaaaaaagaaaaagggatcctacccatacgatgttccagattacgcttatccctacgacgtgcctgattatgcatacccatatgatgtccccgactatgcctaa

SEQ ID NO: 3 - protein, 1361 aa, synthetic construct
  REGION 1..1361: note = BhCas12b GGSGGS-ABE8-Xten20at P153 polypeptide sequence
MAPKKKRKVGIHGVPAAATRSFILKIEPNEEVKKGLWKTHEVLNHGIAYYMNILKLIRQEAIYEHHEQDPKNPKKVSKAEIQAELWDFVLKMQKCNSFTHEVDKDEVFNILRELYEELVPSSVEKKGEANQLSNKFLYPLVDPNSQSGKGTASSGRKPRWYNLKIAGDPGGSGGSSEVEFSHEYWMRHALTLAKRARDEREVPVGAVLVLNNRVIGEGWNRAIGLHDPTAHAEIMALRQGGLVMQNYRLYDATLYVTFEPCVMCAGAMIHSRIGRVVFGVRNAKTGAAGSLMDVLHHPGMNHRVEITEGILADECAALLCRFFRMPRRVFNAQKKAQSSTDGSSGSETPGTSESATPESSGSWEEEKKKWEEDKKKDPLAKILGKLAEYGLIPLFIPYTDSNEPIVKEIKWMEKSRNQSVRRLDKDMFIQALERFLSWESWNLKVKEEYEKVEKEYKTLEERIKEDIQALKALEQYEKERQEQLLRDTLNTNEYRLSKRGLRGWREIIQKWLKMDENEPSEKYLEVFKDYQRKHPREAGDYSVYEFLSKKENHFIWRNHPEYPYLYATFCEIDKKKKDAKQQATFTLADPINHPLWVRFEERSGSNLNKYRILTEQLHTEKLKKKLTVQLDRLIYPTESGGWEEKGKVDIVLLPSRQFYNQIFLDIEEKGKHAFTYKDESIKFPLKGTLGGARVQFDRDHLRRYPHKVESGNVGRIYFNMTVNIEPTESPVSKSLKIHRDDFPKVVNFKPKELTEWIKDSKGKKLKSGIESLEIGLRVMSIDLGQRQAAAASIFEVVDQKPDIEGKLFFPIKGTELYAVHRASFNIKLPGETLVKSREVLRKAREDNLKLMNQKLNFLRNVLHFQQFEDITEREKRVTKWISRQENSDVPLVYQDELIQIRELMYKPYKDWVAFLKQLHKRLEVEIGKEVKHWRKSLSDGRKGLYGISLKNIDEIDRTRKFLLRWSLRPTEPGEVRRLEPGQRFAIDQLNHLNALKEDRLKKMANTIIMHALGYCYDVRKKKWQAKNPACQIILFEDLSNYNPYEERSRFENSKLMKWSRREIPRQVALQGEIYGLQVGEVGAQFSSRFHAKTGSPGIRCSVVTKEKLQDNRFFKNLQREGRLTLDKIAVLKEGDLYPDKGGEKFISLSKDRKCVTTHADINAAQNLQKRFWTRTHGFYKVYCKAYQVDGQTVYIPESKDQKQKIIEEFGEGYFILKDGVYEWVNAGKLKIKKGSSKQSSSELVDSDILKDSFDLASELKGEKLMLYRDPSGNVFPSDKWMAAGVFFGKLERILISKLTNQYSISTIEDDSSKQSMKRPAATKKAGQAKKKKGSYPYDVPDYAYPYDVPDYAYPYDVPDYA

SEQ ID NO: 4 - DNA, 4092 bp, synthetic construct
  misc_feature 1..4092: note = BhCas12b GGSGGS-ABE8-Xten20at K255 polynucleotide sequence
  misc_feature 1..6: note = Kozak sequence
  misc_feature 7..57: note = Sequence encoding N-terminal nuclear localization signal (NLS)
  misc_feature 58..822: note = Sequence encoding BhCas12b
  misc_feature 823..840: note = Sequence encoding a linker
  misc_feature 841..1338: note = Sequence encoding TadA*8
  misc_feature 1339..1398: note = Sequence encoding Xten20 linker
  misc_feature 1399..3954: note = Sequence encoding BhCas12b
  misc_feature 3955..4002: note = Sequence encoding C-terminal NLS
  misc_feature 4003..4008: note = Sequence encoding a GS linker
  misc_feature 4009..4089: note = Sequence encoding 3x hemagglutinin (HA) tag
  source 1..4092: mol_type = other DNA
gccaccatggccccaaagaagaagcggaaggtcggtatccacggagtcccagcagccgccaccagatccttcatcctgaagatcgagcccaacgaggaagtgaagaaaggcctctggaaaacccacgaggtgctgaaccacggaatcgcctactacatgaatatcctgaagctgatccggcaagaggccatctacgagcaccacgagcaggaccccaagaatcccaagaaggtgtccaaggccgagatccaggccgagctgtgggatttcgtgctgaagatgcagaagtgcaacagcttcacacacgaggtggacaaggacgaggtgttcaacatcctgagagagctgtacgaggaactggtgcccagcagcgtggaaaagaagggcgaagccaaccagctgagcaacaagtttctgtaccctctggtggaccccaacagccagtctggaaagggaacagccagcagcggcagaaagcccagatggtacaacctgaagattgccggcgatccctcctgggaagaagagaagaagaagtgggaagaagataagaaaaaggacccgctggccaagatcctgggcaagctggctgagtacggactgatccctctgttcatcccctacaccgacagcaacgagcccatcgtgaaagaaatcaagtggatggaaaagtcccggaaccagagcgtgcggcggctggataaggacatgttcattcaggccctggaacggttcctgagctgggagagctggaacctgaaagtgaaagaggaatacgagaaggtcgagaaagagtacaagaccctggaagagaggatcaaaggaggctctggaggaagctccgaagtcgagttttcccatgagtactggatgagacacgcattgactctcgcaaagagggctcgagatgaacgcgaggtgcccgtgggggcagtactcgtgctcaacaatcgcgtaatcggcgaaggttggaatagggcaatcggactccacgaccccactgcacatgcggaaatcatggcccttcgacagggagggcttgtgatgcagaattatcgactttatgatgcgacgctgtacgtcacgtttgaaccttgcgtaatgtgcgcgggagctatgattcactcccgcattggacgagttgtattcggtgttcgcaacgccaagacgggtgccgcaggttcactgatggacgtgctgcatcatccaggcatgaaccaccgggtagaaatcacagaaggcatattggcggacgaatgtgcggcgctgttgtgtcgtttttttcgcatgcccaggcgggtctttaacgcccagaaaaaagcacaatcctctactgacggctcttctggatctgaaacacctggcacaagcgagagcgccacccctgagagctctggcgaggacatccaggctctgaaggctctggaacagtatgagaaagagcggcaagaacagctgctgcgggacaccctgaacaccaacgagtaccggctgagcaagagaggccttagaggctggcgggaaatcatccagaaatggctgaaaatggacgagaacgagccctccgagaagtacctggaagtgttcaaggactaccagcggaagcaccctagagaggccggcgattacagcgtgtacgagttcctgtccaagaaagagaaccacttcatctggcggaatcaccctgagtacccctacctgtacgccaccttctgcgagatcgacaagaaaaagaaggacgccaagcagcaggccaccttcacactggccgatcctatcaatcaccctctgtgggtccgattcgaggaaagaagcggcagcaacctgaacaagtacagaatcctgaccgagcagctgcacaccgagaagctgaagaaaaagctgacagtgcagctggaccggctgatctaccctacagaatctggcggctgggaagagaagggcaaagtggacattgtgctgctgcccagccggcagttctacaaccagatcttcctggacatcgaggaaaagggcaagcacgccttcacctacaaggatgagagcatcaagttccctctgaagggcacactcggcggagccagagtgcagttcgacagagatcacctgagaagataccctcacaaggtggaaagcggcaacgtgggcagaatctacttcaacatgaccgtgaacatcgagcctacagagtccccagtgtccaagtctctgaagatccaccgggacgacttccccaaggtggtcaacttcaagcccaaagaactgaccgagtggatcaaggacagcaagggcaagaaactgaagtccggcatcgagtccctggaaatcggcctgagagtgatgagcatcgacctgggacagagacaggccgctgccgcctctattttcgaggtggtggatcagaagcccgacatcgaaggcaagctgtttttcccaatcaagggcaccgagctgtatgccgtgcacagagccagcttcaacatcaagctgcccggcgagacactggtcaagagcagagaagtgctgcggaaggccagagaggacaatctgaaactgatgaaccagaagctcaacttcctgcggaacgtgctgcacttccagcagttcgaggacatcaccgagagagagaagcgggtcaccaagtggatcagcagacaagagaacagcgacgtgcccctggtgtaccaggatgagctgatccagatccgcgagctgatgtacaagccttacaaggactgggtcgccttcctgaagcagctccacaagagactggaagtcgagatcggcaaagaagtgaagcactggcggaagtccctgagcgacggaagaaagggcctgtacggcatctccctgaagaacatcgacgagatcgatcggacccggaagttcctgctgagatggtccctgaggcctaccgaacctggcgaagtgcgtagactggaacccggccagagattcgccatcgaccagctgaatcacctgaacgccctgaaagaagatcggctgaagaagatggccaacaccatcatcatgcacgccctgggctactgctacgacgtgcggaagaagaaatggcaggctaagaaccccgcctgccagatcatcctgttcgaggatctgagcaactacaacccctacgaggaaaggtcccgcttcgagaacagcaagctcatgaagtggtccagacgcgagatccccagacaggttgcactgcagggcgagatctatggcctgcaagtgggagaagtgggcgctcagttcagcagcagattccacgccaagacaggcagccctggcatcagatgtagcgtcgtgaccaaagagaagctgcaggacaatcggttcttcaagaatctgcagagagagggcagactgaccctggacaaaatcgccgtgctgaaagagggcgatctgtacccagacaaaggcggcgagaagttcatcagcctgagcaaggatcggaagtgcgtgaccacacacgccgacatcaacgccgctcagaacctgcagaagcggttctggacaagaacccacggcttctacaaggtgtactgcaaggcctaccaggtggacggccagaccgtgtacatccctgagagcaaggaccagaagcagaagatcatcgaagagttcggcgagggctacttcattctgaaggacggggtgtacgaatgggtcaacgccggcaagctgaaaatcaagaagggcagctccaagcagagcagcagcgagctggtggatagcgacatcctgaaagacagcttcgacctggcctccgagctgaaaggcgaaaagctgatgctgtacagggaccccagcggcaatgtgttccccagcgacaaatggatggccgctggcgtgttcttcggaaagctggaacgcatcctgatcagcaagctgaccaaccagtactccatcagcaccatcgaggacgacagcagcaagcagtctatgaaaaggccggcggccacgaaaaaggccggccaggcaaaaaagaaaaagggatcctacccatacgatgttccagattacgcttatccctacgacgtgcctgattatgcatacccatatgatgtccccgactatgcctaa

SEQ ID NO: 5 - protein, 1361 aa, synthetic construct
  REGION 1..1361: note = BhCas12b GGSGGS-ABE8-Xten20at K255 polypeptide sequence
MAPKKKRKVGIHGVPAAATRSFILKIEPNEEVKKGLWKTHEVLNHGIAYYMNILKLIRQEAIYEHHEQDPKNPKKVSKAEIQAELWDFVLKMQKCNSFTHEVDKDEVFNILRELYEELVPSSVEKKGEANQLSNKFLYPLVDPNSQSGKGTASSGRKPRWYNLKIAGDPSWEEEKKKWEEDKKKDPLAKILGKLAEYGLIPLFIPYTDSNEPIVKEIKWMEKSRNQSVRRLDKDMFIQALERFLSWESWNLKVKEEYEKVEKEYKTLEERIKGGSGGSSEVEFSHEYWMRHALTLAKRARDEREVPVGAVLVLNNRVIGEGWNRAIGLHDPTAHAEIMALRQGGLVMQNYRLYDATLYVTFEPCVMCAGAMIHSRIGRVVFGVRNAKTGAAGSLMDVLHHPGMNHRVEITEGILADECAALLCRFFRMPRRVFNAQKKAQSSTDGSSGSETPGTSESATPESSGEDIQALKALEQYEKERQEQLLRDTLNTNEYRLSKRGLRGWREIIQKWLKMDENEPSEKYLEVFKDYQRKHPREAGDYSVYEFLSKKENHFIWRNHPEYPYLYATFCEIDKKKKDAKQQATFTLADPINHPLWVRFEERSGSNLNKYRILTEQLHTEKLKKKLTVQLDRLIYPTESGGWEEKGKVDIVLLPSRQFYNQIFLDIEEKGKHAFTYKDESIKFPLKGTLGGARVQFDRDHLRRYPHKVESGNVGRIYFNMTVNIEPTESPVSKSLKIHRDDFPKVVNFKPKELTEWIKDSKGKKLKSGIESLEIGLRVMSIDLGQRQAAAASIFEVVDQKPDIEGKLFFPIKGTELYAVHRASFNIKLPGETLVKSREVLRKAREDNLKLMNQKLNFLRNVLHFQQFEDITEREKRVTKWISRQENSDVPLVYQDELIQIRELMYKPYKDWVAFLKQLHKRLEVEIGKEVKHWRKSLSDGRKGLYGISLKNIDEIDRTRKFLLRWSLRPTEPGEVRRLEPGQRFAIDQLNHLNALKEDRLKKMANTIIMHALGYCYDVRKKKWQAKNPACQIILFEDLSNYNPYEERSRFENSKLMKWSRREIPRQVALQGEIYGLQVGEVGAQFSSRFHAKTGSPGIRCSVVTKEKLQDNRFFKNLQREGRLTLDKIAVLKEGDLYPDKGGEKFISLSKDRKCVTTHADINAAQNLQKRFWTRTHGFYKVYCKAYQVDGQTVYIPESKDQKQKIIEEFGEGYFILKDGVYEWVNAGKLKIKKGSSKQSSSELVDSDILKDSFDLASELKGEKLMLYRDPSGNVFPSDKWMAAGVFFGKLERILISKLTNQYSISTIEDDSSKQSMKRPAATKKAGQAKKKKGSYPYDVPDYAYPYDVPDYAYPYDVPDYA

SEQ ID NO: 6 - DNA, 4092 bp, synthetic construct
  misc_feature 1..4092: note = BhCas12b GGSGGS-ABE8-Xten20at D306 polynucleotide sequence
  misc_feature 1..6: note = Kozak sequence
  misc_feature 7..57: note = Sequence encoding N-terminal nuclear localization signal (NLS)
  misc_feature 58..975: note = Sequence encoding BhCas12b
  misc_feature 976..993: note = Sequence encoding a linker
  misc_feature 994..1491: note = Sequence encoding TadA*8
  misc_feature 1492..1551: note = Sequence encoding Xten20 linker
  misc_feature 1552..3954: note = Sequence encoding BhCas12b
  misc_feature 3955..4002: note = Sequence encoding C-terminal NLS
  misc_feature 4003..4008: note = Sequence encoding a GS linker
  misc_feature 4009..4089: note = Sequence encoding 3x hemagglutinin (HA) tag
  source 1..4092: mol_type = other DNA
gccaccatggccccaaagaagaagcggaaggtcggtatccacggagtcccagcagccgccaccagatccttcatcctgaagatcgagcccaacgaggaagtgaagaaaggcctctggaaaacccacgaggtgctgaaccacggaatcgcctactacatgaatatcctgaagctgatccggcaagaggccatctacgagcaccacgagcaggaccccaagaatcccaagaaggtgtccaaggccgagatccaggccgagctgtgggatttcgtgctgaagatgcagaagtgcaacagcttcacacacgaggtggacaaggacgaggtgttcaacatcctgagagagctgtacgaggaactggtgcccagcagcgtggaaaagaagggcgaagccaaccagctgagcaacaagtttctgtaccctctggtggaccccaacagccagtctggaaagggaacagccagcagcggcagaaagcccagatggtacaacctgaagattgccggcgatccctcctgggaagaagagaagaagaagtgggaagaagataagaaaaaggacccgctggccaagatcctgggcaagctggctgagtacggactgatccctctgttcatcccctacaccgacagcaacgagcccatcgtgaaagaaatcaagtggatggaaaagtcccggaaccagagcgtgcggcggctggataaggacatgttcattcaggccctggaacggttcctgagctgggagagctggaacctgaaagtgaaagaggaatacgagaaggtcgagaaagagtacaagaccctggaagagaggatcaaagaggacatccaggctctgaaggctctggaacagtatgagaaagagcggcaagaacagctgctgcgggacaccctgaacaccaacgagtaccggctgagcaagagaggccttagaggctggcgggaaatcatccagaaatggctgaaaatggacggaggctctggaggaagctccgaagtcgagttttcccatgagtactggatgagacacgcattgactctcgcaaagagggctcgagatgaacgcgaggtgcccgtgggggcagtactcgtgctcaacaatcgcgtaatcggcgaaggttggaatagggcaatcggactccacgaccccactgcacatgcggaaatcatggcccttcgacagggagggcttgtgatgcagaattatcgactttatgatgcgacgctgtacgtcacgtttgaaccttgcgtaatgtgcgcgggagctatgattcactcccgcattggacgagttgtattcggtgttcgcaacgccaagacgggtgccgcaggttcactgatggacgtgctgcatcatccaggcatgaaccaccgggtagaaatcacagaaggcatattggcggacgaatgtgcggcgctgttgtgtcgtttttttcgcatgcccaggcgggtctttaacgcccagaaaaaagcacaatcctctactgacggctcttctggatctgaaacacctggcacaagcgagagcgccacccctgagagctctggcgagaacgagccctccgagaagtacctggaagtgttcaaggactaccagcggaagcaccctagagaggccggcgattacagcgtgtacgagttcctgtccaagaaagagaaccacttcatctggcggaatcaccctgagtacccctacctgtacgccaccttctgcgagatcgacaagaaaaagaaggacgccaagcagcaggccaccttcacactggccgatcctatcaatcaccctctgtgggtccgattcgaggaaagaagcggcagcaacctgaacaagtacagaatcctgaccgagcagctgcacaccgagaagctgaagaaaaagctgacagtgcagctggaccggctgatctaccctacagaatctggcggctgggaagagaagggcaaagtggacattgtgctgctgcccagccggcagttctacaaccagatcttcctggacatcgaggaaaagggcaagcacgccttcacctacaaggatgagagcatcaagttccctctgaagggcacactcggcggagccagagtgcagttcgacagagatcacctgagaagataccctcacaaggtggaaagcggcaacgtgggcagaatctacttcaacatgaccgtgaacatcgagcctacagagtccccagtgtccaagtctctgaagatccaccgggacgacttccccaaggtggtcaacttcaagcccaaagaactgaccgagtggatcaaggacagcaagggcaagaaactgaagtccggcatcgagtccctggaaatcggcctgagagtgatgagcatcgacctgggacagagacaggccgctgccgcctctattttcgaggtggtggatcagaagcccgacatcgaaggcaagctgtttttcccaatcaagggcaccgagctgtatgccgtgcacagagccagcttcaacatcaagctgcccggcgagacactggtcaagagcagagaagtgctgcggaaggccagagaggacaatctgaaactgatgaaccagaagctcaacttcctgcggaacgtgctgcacttccagcagttcgaggacatcaccgagagagagaagcgggtcaccaagtggatcagcagacaagagaacagcgacgtgcccctggtgtaccaggatgagctgatccagatccgcgagctgatgtacaagccttacaaggactgggtcgccttcctgaagcagctccacaagagactggaagtcgagatcggcaaagaagtgaagcactggcggaagtccctgagcgacggaagaaagggcctgtacggcatctccctgaagaacatcgacgagatcgatcggacccggaagttcctgctgagatggtccctgaggcctaccgaacctggcgaagtgcgtagactggaacccggccagagattcgccatcgaccagctgaatcacctgaacgccctgaaagaagatcggctgaagaagatggccaacaccatcatcatgcacgccctgggctactgctacgacgtgcggaagaagaaatggcaggctaagaaccccgcctgccagatcatcctgttcgaggatctgagcaactacaacccctacgaggaaaggtcccgcttcgagaacagcaagctcatgaagtggtccagacgcgagatccccagacaggttgcactgcagggcgagatctatggcctgcaagtgggagaagtgggcgctcagttcagcagcagattccacgccaagacaggcagccctggcatcagatgtagcgtcgtgaccaaagagaagctgcaggacaatcggttcttcaagaatctgcagagagagggcagactgaccctggacaaaatcgccgtgctgaaagagggcgatctgtacccagacaaaggcggcgagaagttcatcagcctgagcaaggatcggaagtgcgtgaccacacacgccgacatcaacgccgctcagaacctgcagaagcggttctggacaagaacccacggcttctacaaggtgtactgcaaggcctaccaggtggacggccagaccgtgtacatccctgagagcaaggaccagaagcagaagatcatcgaagagttcggcgagggctacttcattctgaaggacggggtgtacgaatgggtcaacgccggcaagctgaaaatcaagaagggcagctccaagcagagcagcagcgagctggtggatagcgacatcctgaaagacagcttcgacctggcctccgagctgaaaggcgaaaagctgatgctgtacagggaccccagcggcaatgtgttccccagcgacaaatggatggccgctggcgtgttcttcggaaagctggaacgcatcctgatcagcaagctgaccaaccagtactccatcagcaccatcgaggacgacagcagcaagcagtctatgaaaaggccggcggccacgaaaaaggccggccaggcaaaaaagaaaaagggatcctacccatacgatgttccagattacgcttatccctacgacgtgcctgattatgcatacccatatgatgtccccgactatgcctaa

SEQ ID NO: 7 - protein, 1361 aa, synthetic construct
  REGION 1..1361: note = BhCas12b GGSGGS-ABE8-Xten20at D306 polypeptide sequence
MAPKKKRKVGIHGVPAAATRSFILKIEPNEEVKKGLWKTHEVLNHGIAYYMNILKLIRQEAIYEHHEQDPKNPKKVSKAEIQAELWDFVLKMQKCNSFTHEVDKDEVFNILRELYEELVPSSVEKKGEANQLSNKFLYPLVDPNSQSGKGTASSGRKPRWYNLKIAGDPSWEEEKKKWEEDKKKDPLAKILGKLAEYGLIPLFIPYTDSNEPIVKEIKWMEKSRNQSVRRLDKDMFIQALERFLSWESWNLKVKEEYEKVEKEYKTLEERIKEDIQALKALEQYEKERQEQLLRDTLNTNEYRLSKRGLRGWREIIQKWLKMDGGSGGSSEVEFSHEYWMRHALTLAKRARDEREVPVGAVLVLNNRVIGEGWNRAIGLHDPTAHAEIMALRQGGLVMQNYRLYDATLYVTFEPCVMCAGAMIHSRIGRVVFGVRNAKTGAAGSLMDVLHHPGMNHRVEITEGILADECAALLCRFFRMPRRVFNAQKKAQSSTDGSSGSETPGTSESATPESSGENEPSEKYLEVFKDYQRKHPREAGDYSVYEFLSKKENHFIWRNHPEYPYLYATFCEIDKKKKDAKQQATFTLADPINHPLWVRFEERSGSNLNKYRILTEQLHTEKLKKKLTVQLDRLIYPTESGGWEEKGKVDIVLLPSRQFYNQIFLDIEEKGKHAFTYKDESIKFPLKGTLGGARVQFDRDHLRRYPHKVESGNVGRIYFNMTVNIEPTESPVSKSLKIHRDDFPKVVNFKPKELTEWIKDSKGKKLKSGIESLEIGLRVMSIDLGQRQAAAASIFEVVDQKPDIEGKLFFPIKGTELYAVHRASFNIKLPGETLVKSREVLRKAREDNLKLMNQKLNFLRNVLHFQQFEDITEREKRVTKWISRQENSDVPLVYQDELIQIRELMYKPYKDWVAFLKQLHKRLEVEIGKEVKHWRKSLSDGRKGLYGISLKNIDEIDRTRKFLLRWSLRPTEPGEVRRLEPGQRFAIDQLNHLNALKEDRLKKMANTIIMHALGYCYDVRKKKWQAKNPACQIILFEDLSNYNPYEERSRFENSKLMKWSRREIPRQVALQGEIYGLQVGEVGAQFSSRFHAKTGSPGIRCSVVTKEKLQDNRFFKNLQREGRLTLDKIAVLKEGDLYPDKGGEKFISLSKDRKCVTTHADINAAQNLQKRFWTRTHGFYKVYCKAYQVDGQTVYIPESKDQKQKIIEEFGEGYFILKDGVYEWVNAGKLKIKKGSSKQSSSELVDSDILKDSFDLASELKGEKLMLYRDPSGNVFPSDKWMAAGVFFGKLERILISKLTNQYSISTIEDDSSKQSMKRPAATKKAGQAKKKKGSYPYDVPDYAYPYDVPDYAYPYDVPDYA

SEQ ID NO: 8 - DNA, 4092 bp, synthetic construct
  misc_feature 1..4092: note = BhCas12b GGSGGS-ABE8-Xten20at D980 polynucleotide sequence
  misc_feature 1..6: note = Kozak sequence
  misc_feature 7..57: note = Sequence encoding N-terminal nuclear localization signal (NLS)
  misc_feature 58..2997: note = Sequence encoding BhCas12b
  misc_feature 2998..3015: note = Sequence encoding a linker
  misc_feature 3016..3513: note = Sequence encoding TadA*8
  misc_feature 3514..3573: note = Sequence encoding Xten20 linker
  misc_feature 3574..3954: note = Sequence encoding BhCas12b
  misc_feature 3955..4002: note = Sequence encoding C-terminal NLS
  misc_feature 4003..4008: note = Sequence encoding a GS linker
  misc_feature 4009..4089: note = Sequence encoding 3x hemagglutinin (HA) tag
  source 1..4092: mol_type = other DNA
gccaccatggccccaaagaagaagcggaaggtcggtatccacggagtcccagcagccgccaccagatccttcatcctgaagatcgagcccaacgaggaagtgaagaaaggcctctggaaaacccacgaggtgctgaaccacggaatcgcctactacatgaatatcctgaagctgatccggcaagaggccatctacgagcaccacgagcaggaccccaagaatcccaagaaggtgtccaaggccgagatccaggccgagctgtgggatttcgtgctgaagatgcagaagtgcaacagcttcacacacgaggtggacaaggacgaggtgttcaacatcctgagagagctgtacgaggaactggtgcccagcagcgtggaaaagaagggcgaagccaaccagctgagcaacaagtttctgtaccctctggtggaccccaacagccagtctggaaagggaacagccagcagcggcagaaagcccagatggtacaacctgaagattgccggcgatccctcctgggaagaagagaagaagaagtgggaagaagataagaaaaaggacccgctggccaagatcctgggcaagctggctgagtacggactgatccctctgttcatcccctacaccgacagcaacgagcccatcgtgaaagaaatcaagtggatggaaaagtcccggaaccagagcgtgcggcggctggataaggacatgttcattcaggccctggaacggttcctgagctgggagagctggaacctgaaagtgaaagaggaatacgagaaggtcgagaaagagtacaagaccctggaagagaggatcaaagaggacatccaggctctgaaggctctggaacagtatgagaaagagcggcaagaacagctgctgcgggacaccctgaacaccaacgagtaccggctgagcaagagaggccttagaggctggcgggaaatcatccagaaatggctgaaaatggacgagaacgagccctccgagaagtacctggaagtgttcaaggactaccagcggaagcaccctagagaggccggcgattacagcgtgtacgagttcctgtccaagaaagagaaccacttcatctggcggaatcaccctgagtacccctacctgtacgccaccttctgcgagatcgacaagaaaaagaaggacgccaagcagcaggccaccttcacactggccgatcctatcaatcaccctctgtgggtccgattcgaggaaagaagcggcagcaacctgaacaagtacagaatcctgaccgagcagctgcacaccgagaagctgaagaaaaagctgacagtgcagctggaccggctgatctaccctacagaatctggcggctgggaagagaagggcaaagtggacattgtgctgctgcccagccggcagttctacaaccagatcttcctggacatcgaggaaaagggcaagcacgccttcacctacaaggatgagagcatcaagttccctctgaagggcacactcggcggagccagagtgcagttcgacagagatcacctgagaagataccctcacaaggtggaaagcggcaacgtgggcagaatctacttcaacatgaccgtgaacatcgagcctacagagtccccagtgtccaagtctctgaagatccaccgggacgacttccccaaggtggtcaacttcaagcccaaagaactgaccgagtggatcaaggacagcaagggcaagaaactgaagtccggcatcgagtccctggaaatcggcctgagagtgatgagcatcgacctgggacagagacaggccgctgccgcctctattttcgaggtggtggatcagaagcccgacatcgaaggcaagctgtttttcccaatcaagggcaccgagctgtatgccgtgcacagagccagcttcaacatcaagctgcccggcgagacactggtcaagagcagagaagtgctgcggaaggccagagaggacaatctgaaactgatgaaccagaagctcaacttcctgcggaacgtgctgcacttccagcagttcgaggacatcaccgagagagagaagcgggtcaccaagtggatcagcagacaagagaacagcgacgtgcccctggtgtaccaggatgagctgatccagatccgcgagctgatgtacaagccttacaaggactgggtcgccttcctgaagcagctccacaagagactggaagtcgagatcggcaaagaagtgaagcactggcggaagtccctgagcgacggaagaaagggcctgtacggcatctccctgaagaacatcgacgagatcgatcggacccggaagttcctgctgagatggtccctgaggcctaccgaacctggcgaagtgcgtagactggaacccggccagagattcgccatcgaccagctgaatcacctgaacgccctgaaagaagatcggctgaagaagatggccaacaccatcatcatgcacgccctgggctactgctacgacgtgcggaagaagaaatggcaggctaagaaccccgcctgccagatcatcctgttcgaggatctgagcaactacaacccctacgaggaaaggtcccgcttcgagaacagcaagctcatgaagtggtccagacgcgagatccccagacaggttgcactgcagggcgagatctatggcctgcaagtgggagaagtgggcgctcagttcagcagcagattccacgccaagacaggcagccctggcatcagatgtagcgtcgtgaccaaagagaagctgcaggacaatcggttcttcaagaatctgcagagagagggcagactgaccctggacaaaatcgccgtgctgaaagagggcgatctgtacccagacaaaggcggcgagaagttcatcagcctgagcaaggatcggaagtgcgtgaccacacacgccgacatcaacgccgctcagaacctgcagaagcggttctggacaagaacccacggcttctacaaggtgtactgcaaggcctaccaggtggacggaggctctggaggaagctccgaagtcgagttttcccatgagtactggatgagacacgcattgactctcgcaaagagggctcgagatgaacgcgaggtgcccgtgggggcagtactcgtgctcaacaatcgcgtaatcggcgaaggttggaatagggcaatcggactccacgaccccactgcacatgcggaaatcatggcccttcgacagggagggcttgtgatgcagaattatcgactttatgatgcgacgctgtacgtcacgtttgaaccttgcgtaatgtgcgcgggagctatgattcactcccgcattggacgagttgtattcggtgttcgcaacgccaagacgggtgccgcaggttcactgatggacgtgctgcatcatccaggcatgaaccaccgggtagaaatcacagaaggcatattggcggacgaatgtgcggcgctgttgtgtcgtttttttcgcatgcccaggcgggtctttaacgcccagaaaaaagcacaatcctctactgacggctcttctggatctgaaacacctggcacaagcgagagcgccacccctgagagctctggcggccagaccgtgtacatccctgagagcaaggaccagaagcagaagatcatcgaagagttcggcgagggctacttcattctgaaggacggggtgtacgaatgggtcaacgccggcaagctgaaaatcaagaagggcagctccaagcagagcagcagcgagctggtggatagcgacatcctgaaagacagcttcgacctggcctccgagctgaaaggcgaaaagctgatgctgtacagggaccccagcggcaatgtgttccccagcgacaaatggatggccgctggcgtgttcttcggaaagctggaacgcatcctgatcagcaagctgaccaaccagtactccatcagcaccatcgaggacgacagcagcaagcagtctatgaaaaggccggcggccacgaaaaaggccggccaggcaaaaaagaaaaagggatcctacccatacgatgttccagattacgcttatccctacgacgtgcctgattatgcatacccatatgatgtccccgactatgcctaa

SEQ ID NO: 9 - protein, 1361 aa, synthetic construct
  REGION 1..1361: note = BhCas12b GGSGGS-ABE8-Xten20at D980 polypeptide sequence
MAPKKKRKVGIHGVPAAATRSFILKIEPNEEVKKGLWKTHEVLNHGIAYYMNILKLIRQEAIYEHHEQDPKNPKKVSKAEIQAELWDFVLKMQKCNSFTHEVDKDEVFNILRELYEELVPSSVEKKGEANQLSNKFLYPLVDPNSQSGKGTASSGRKPRWYNLKIAGDPSWEEEKKKWEEDKKKDPLAKILGKLAEYGLIPLFIPYTDSNEPIVKEIKWMEKSRNQSVRRLDKDMFIQALERFLSWESWNLKVKEEYEKVEKEYKTLEERIKEDIQALKALEQYEKERQEQLLRDTLNTNEYRLSKRGLRGWREIIQKWLKMDENEPSEKYLEVFKDYQRKHPREAGDYSVYEFLSKKENHFIWRNHPEYPYLYATFCEIDKKKKDAKQQATFTLADPINHPLWVRFEERSGSNLNKYRILTEQLHTEKLKKKLTVQLDRLIYPTESGGWEEKGKVDIVLLPSRQFYNQIFLDIEEKGKHAFTYKDESIKFPLKGTLGGARVQFDRDHLRRYPHKVESGNVGRIYFNMTVNIEPTESPVSKSLKIHRDDFPKVVNFKPKELTEWIKDSKGKKLKSGIESLEIGLRVMSIDLGQRQAAAASIFEVVDQKPDIEGKLFFPIKGTELYAVHRASFNIKLPGETLVKSREVLRKAREDNLKLMNQKLNFLRNVLHFQQFEDITEREKRVTKWISRQENSDVPLVYQDELIQIRELMYKPYKDWVAFLKQLHKRLEVEIGKEVKHWRKSLSDGRKGLYGISLKNIDEIDRTRKFLLRWSLRPTEPGEVRRLEPGQRFAIDQLNHLNALKEDRLKKMANTIIMHALGYCYDVRKKKWQAKNPACQIILFEDLSNYNPYEERSRFENSKLMKWSRREIPRQVALQGEIYGLQVGEVGAQFSSRFHAKTGSPGIRCSVVTKEKLQDNRFFKNLQREGRLTLDKIAVLKEGDLYPDKGGEKFISLSKDRKCVTTHADINAAQNLQKRFWTRTHGFYKVYCKAYQVDGGSGGSSEVEFSHEYWMRHALTLAKRARDEREVPVGAVLVLNNRVIGEGWNRAIGLHDPTAHAEIMALRQGGLVMQNYRLYDATLYVTFEPCVMCAGAMIHSRIGRVVFGVRNAKTGAAGSLMDVLHHPGMNHRVEITEGILADECAALLCRFFRMPRRVFNAQKKAQSSTDGSSGSETPGTSESATPESSGGQTVYIPESKDQKQKIIEEFGEGYFILKDGVYEWVNAGKLKIKKGSSKQSSSELVDSDILKDSFDLASELKGEKLMLYRDPSGNVFPSDKWMAAGVFFGKLERILISKLTNQYSISTIEDDSSKQSMKRPAATKKAGQAKKKKGSYPYDVPDYAYPYDVPDYAYPYDVPDYA

SEQ ID NO: 10 - DNA, 4092 bp, synthetic construct
  misc_feature 1..4092: note = BhCas12b GGSGGS-ABE8-Xten20at K1019 polynucleotide sequence
  misc_feature 1..6: note = Kozak sequence
  misc_feature 7..57: note = Sequence encoding N-terminal nuclear localization signal (NLS)
  misc_feature 58..3114: note = Sequence encoding BhCas12b
  misc_feature 3115..3132: note = Sequence encoding a linker
  misc_feature 3133..3630: note = Sequence encoding TadA*8
  misc_feature 3631..3690: note = Sequence encoding Xten20 linker
  misc_feature 3691..3954: note = Sequence encoding BhCas12b
  misc_feature 3955..4002: note = Sequence encoding C-terminal NLS
  misc_feature 4003..4008: note = Sequence encoding GS linker
  misc_feature 4009..4089: note = Sequence encoding 3x hemagglutinin (HA) tag
  source 1..4092: mol_type = other DNA
gccaccatggccccaaagaagaagcggaaggtcggtatccacggagtcccagcagccgccaccagatccttcatcctgaagatcgagcccaacgaggaagtgaagaaaggcctctggaaaacccacgaggtgctgaaccacggaatcgcctactacatgaatatcctgaagctgatccggcaagaggccatctacgagcaccacgagcaggaccccaagaatcccaagaaggtgtccaaggccgagatccaggccgagctgtgggatttcgtgctgaagatgcagaagtgcaacagcttcacacacgaggtggacaaggacgaggtgttcaacatcctgagagagctgtacgaggaactggtgcccagcagcgtggaaaagaagggcgaagccaaccagctgagcaacaagtttctgtaccctctggtggaccccaacagccagtctggaaagggaacagccagcagcggcagaaagcccagatggtacaacctgaagattgccggcgatccctcctgggaagaagagaagaagaagtgggaagaagataagaaaaaggacccgctggccaagatcctgggcaagctggctgagtacggactgatccctctgttcatcccctacaccgacagcaacgagcccatcgtgaaagaaatcaagtggatggaaaagtcccggaaccagagcgtgcggcggctggataaggacatgttcattcaggccctggaacggttcctgagctgggagagctggaacctgaaagtgaaagaggaatacgagaaggtcgagaaagagtacaagaccctggaagagaggatcaaagaggacatccaggctctgaaggctctggaacagtatgagaaagagcggcaagaacagctgctgcgggacaccctgaacaccaacgagtaccggctgagcaagagaggccttagaggctggcgggaaatcatccagaaatggctgaaaatggacgagaacgagccctccgagaagtacctggaagtgttcaaggactaccagcggaagcaccctagagaggccggcgattacagcgtgtacgagttcctgtccaagaaagagaaccacttcatctggcggaatcaccctgagtacccctacctgtacgccaccttctgcgagatcgacaagaaaaagaaggacgccaagcagcaggccaccttcacactggccgatcctatcaatcaccctctgtgggtccgattcgaggaaagaagcggcagcaacctgaacaagtacagaatcctgaccgagcagctgcacaccgagaagctgaagaaaaagctgacagtgcagctggaccggctgatctaccctacagaatctggcggctgggaagagaagggcaaagtggacattgtgctgctgcccagccggcagttctacaaccagatcttcctggacatcgaggaaaagggcaagcacgccttcacctacaaggatgagagcatcaagttccctctgaagggcacactcggcggagccagagtgcagttcgacagagatcacctgagaagataccctcacaaggtggaaagcggcaacgtgggcagaatctacttcaacatgaccgtgaacatcgagcctacagagtccccagtgtccaagtctctgaagatccaccgggacgacttccccaaggtggtcaacttcaagcccaaagaactgaccgagtggatcaaggacagcaagggcaagaaactgaagtccggcatcgagtccctggaaatcggcctgagagtgatgagcatcgacctgggacagagacaggccgctgccgcctctattttcgaggtggtggatcagaagcccgacatcgaaggcaagctgtttttcccaatcaagggcaccgagctgtatgccgtgcacagagccagcttcaacatcaagctgcccggcgagacactggtcaagagcagagaagtgctgcggaaggccagagaggacaatctgaaactgatgaaccagaagctcaacttcctgcggaacgtgctgcacttccagcagttcgaggacatcaccgagagagagaagcgggtcaccaagtggatcagcagacaagagaacagcgacgtgcccctggtgtaccaggatgagctgatccagatccgcgagctgatgtacaagccttacaaggactgggtcgccttcctgaagcagctccacaagagactggaagtcgagatcggcaaagaagtgaagcactggcggaagtccctgagcgacggaagaaagggcctgtacggcatctccctgaagaacatcgacgagatcgatcggacccggaagttcctgctgagatggtccctgaggcctaccgaacctggcgaagtgcgtagactggaacccggccagagattcgccatcgaccagctgaatcacctgaacgccctgaaagaagatcggctgaagaagatggccaacaccatcatcatgcacgccctgggctactgctacgacgtgcggaagaagaaatggcaggctaagaaccccgcctgccagatcatcctgttcgaggatctgagcaactacaacccctacgaggaaaggtcccgcttcgagaacagcaagctcatgaagtggtccagacgcgagatccccagacaggttgcactgcagggcgagatctatggcctgcaagtgggagaagtgggcgctcagttcagcagcagattccacgccaagacaggcagccctggcatcagatgtagcgtcgtgaccaaagagaagctgcaggacaatcggttcttcaagaatctgcagagagagggcagactgaccctggacaaaatcgccgtgctgaaagagggcgatctgtacccagacaaaggcggcgagaagttcatcagcctgagcaaggatcggaagtgcgtgaccacacacgccgacatcaacgccgctcagaacctgcagaagcggttctggacaagaacccacggcttctacaaggtgtactgcaaggcctaccaggtggacggccagaccgtgtacatccctgagagcaaggaccagaagcagaagatcatcgaagagttcggcgagggctacttcattctgaaggacggggtgtacgaatgggtcaacgccggcaagggaggctctggaggaagctccgaagtcgagttttcccatgagtactggatgagacacgcattgactctcgcaaagagggctcgagatgaacgcgaggtgcccgtgggggcagtactcgtgctcaacaatcgcgtaatcggcgaaggttggaatagggcaatcggactccacgaccccactgcacatgcggaaatcatggcccttcgacagggagggcttgtgatgcagaattatcgactttatgatgcgacgctgtacgtcacgtttgaaccttgcgtaatgtgcgcgggagctatgattcactcccgcattggacgagttgtattcggtgttcgcaacgccaagacgggtgccgcaggttcactgatggacgtgctgcatcatccaggcatgaaccaccgggtagaaatcacagaaggcatattggcggacgaatgtgcggcgctgttgtgtcgtttttttcgcatgcccaggcgggtctttaacgcccagaaaaaagcacaatcctctactgacggctcttctggatctgaaacacctggcacaagcgagagcgccacccctgagagctctggcctgaaaatcaagaagggcagctccaagcagagcagcagcgagctggtggatagcgacatcctgaaagacagcttcgacctggcctccgagctgaaaggcgaaaagctgatgctgtacagggaccccagcggcaatgtgttccccagcgacaaatggatggccgctggcgtgttcttcggaaagctggaacgcatcctgatcagcaagctgaccaaccagtactccatcagcaccatcgaggacgacagcagcaagcagtctatgaaaaggccggcggccacgaaaaaggccggccaggcaaaaaagaaaaagggatcctacccatacgatgttccagattacgcttatccctacgacgtgcctgattatgcatacccatatgatgtccccgactatgcctaa

SEQ ID NO: 11 - protein, 1361 aa, synthetic construct
  REGION 1..1361: note = BhCas12b GGSGGS-ABE8-Xten20at K1019 polypeptide sequence
MAPKKKRKVGIHGVPAAATRSFILKIEPNEEVKKGLWKTHEVLNHGIAYYMNILKLIRQEAIYEHHEQDPKNPKKVSKAEIQAELWDFVLKMQKCNSFTHEVDKDEVFNILRELYEELVPSSVEKKGEANQLSNKFLYPLVDPNSQSGKGTASSGRKPRWYNLKIAGDPSWEEEKKKWEEDKKKDPLAKILGKLAEYGLIPLFIPYTDSNEPIVKEIKWMEKSRNQSVRRLDKDMFIQALERFLSWESWNLKVKEEYEKVEKEYKTLEERIKEDIQALKALEQYEKERQEQLLRDTLNTNEYRLSKRGLRGWREIIQKWLKMDENEPSEKYLEVFKDYQRKHPREAGDYSVYEFLSKKENHFIWRNHPEYPYLYATFCEIDKKKKDAKQQATFTLADPINHPLWVRFEERSGSNLNKYRILTEQLHTEKLKKKLTVQLDRLIYPTESGGWEEKGKVDIVLLPSRQFYNQIFLDIEEKGKHAFTYKDESIKFPLKGTLGGARVQFDRDHLRRYPHKVESGNVGRIYFNMTVNIEPTESPVSKSLKIHRDDFPKVVNFKPKELTEWIKDSKGKKLKSGIESLEIGLRVMSIDLGQRQAAAASIFEVVDQKPDIEGKLFFPIKGTELYAVHRASFNIKLPGETLVKSREVLRKAREDNLKLMNQKLNFLRNVLHFQQFEDITEREKRVTKWISRQENSDVPLVYQDELIQIRELMYKPYKDWVAFLKQLHKRLEVEIGKEVKHWRKSLSDGRKGLYGISLKNIDEIDRTRKFLLRWSLRPTEPGEVRRLEPGQRFAIDQLNHLNALKEDRLKKMANTIIMHALGYCYDVRKKKWQAKNPACQIILFEDLSNYNPYEERSRFENSKLMKWSRREIPRQVALQGEIYGLQVGEVGAQFSSRFHAKTGSPGIRCSVVTKEKLQDNRFFKNLQREGRLTLDKIAVLKEGDLYPDKGGEKFISLSKDRKCVTTHADINAAQNLQKRFWTRTHGFYKVYCKAYQVDGQTVYIPESKDQKQKIIEEFGEGYFILKDGVYEWVNAGKGGSGGSSEVEFSHEYWMRHALTLAKRARDEREVPVGAVLVLNNRVIGEGWNRAIGLHDPTAHAEIMALRQGGLVMQNYRLYDATLYVTFEPCVMCAGAMIHSRIGRVVFGVRNAKTGAAGSLMDVLHHPGMNHRVEITEGILADECAALLCRFFRMPRRVFNAQKKAQSSTDGSSGSETPGTSESATPESSGLKIKKGSSKQSSSELVDSDILKDSFDLASELKGEKLMLYRDPSGNVFPSDKWMAAGVFFGKLERILISKLTNQYSISTIEDDSSKQSMKRPAATKKAGQAKKKKGSYPYDVPDYAYPYDVPDYAYPYDVPDYA

SEQ ID NO: 12 - protein, 208 aa, Petromyzon marinus
  REGION 1..208: note = MISC_FEATURE - tr|A5H718|A5H718_PETMA Cytosine deaminase OS=Petromyzon marinusOX=7757 PE=2 SV=1 amino acid sequence; PmCDA1 polypeptide sequence
MTDAEYVRIHEKLDIYTFKKQFFNNKKSVSHRCYVLFELKRRGERRACFWGYAVNKPQSGTERGIHAEIFSIRKVEEYLRDNPGQFTINWYSSWSPCADCAEKILEWYNQELRGNGHTLKIWACKLYYEKNARNQIGLWNLRDNGVGLNVMVSEHYQCCRKIFIQSSHNQLNENRWLEKTLKRAEKRRSELSIMIQVKILHTTKSPAV

SEQ ID NO: 13 - DNA, 766 bp, Petromyzon marinus
  misc_feature 1..766: note = EF094822.1 Petromyzon marinus isolate PmCDA.21 cytosine deaminase mRNA, complete cds; PmCDA1 polynucleotide sequence
  source 1..766: mol_type = genomic DNA
tgacacgacacagccgtgtatatgaggaagggtagctggatggggggggggggaatacgttcagagaggacattagcgagcgtcttgttggtggccttgagtctagacacctgcagacatgaccgacgctgagtacgtgagaatccatgagaagttggacatctacacgtttaagaaacagtttttcaacaacaaaaaatccgtgtcgcatagatgctacgttctctttgaattaaaacgacggggtgaacgtagagcgtgtttttggggctatgctgtgaataaaccacagagcgggacagaacgtggaattcacgccgaaatctttagcattagaaaagtcgaagaatacctgcgcgacaaccccggacaattcacgataaattggtactcatcctggagtccttgtgcagattgcgctgaaaagatcttagaatggtataaccaggagctgcgggggaacggccacactttgaaaatctgggcttgcaaactctattacgagaaaaatgcgaggaatcaaattgggctgtggaacctcagagataacggggttgggttgaatgtaatggtaagtgaacactaccaatgttgcaggaaaatattcatccaatcgtcgcacaatcaattgaatgagaatagatggcttgagaagactttgaagcgagctgaaaaacgacggagcgagttgtccattatgattcaggtaaaaatactccacaccactaagagtcctgctgtttaagaggctatgcggatggttttc

SEQ ID NO: 14 - protein, 145 aa, Homo sapiens
  REGION 1..145: note = MISC_FEATURE - tr|Q6QJ80|Q6QJ80_HUMAN Activation-induced cytidine deaminase OS=Homo sapiens; OX = 9606 GN=AICDA PE=2 SV=1; AID polypeptide sequence
MDSLLMNRRKFLYQFKNVRWAKGRRETYLCYVVKRRDSATSFSLDFGYLRNKNGCHVELLFLRYISDWDLDPGRCYRVTWFTSWSPCYDCARHVADFLRGNPNLSLRIFTARLYFCEDRKAEPEGLRRLHRAGVQIAIMTFKAPV

SEQ ID NO: 15 - DNA, 10681 bp, Homo sapiens
  misc_feature 1..10681: note = NG_011588.1:5001-15681 Homo sapiens activation induced cytidine deaminase (AICDA), RefSeqGene (LRG_17) on chromosome 12; nucleic acid sequence of the CDS of human AID; polynucleotide sequence
  source 1..10681: mol_type = genomic DNA
agagaaccatcattaattgaagtgagatttttctggcctgagacttgcagggaggcaagaagacactctggacaccactatggacaggtaaagaggcagtcttctcgtgggtgattgcactggccttcctctcagagcaaatctgagtaatgagactggtagctatccctttctctcatgtaactgtctgactgataagatcagcttgatcaatatgcatatatattttttgatctgtctccttttcttctattcagatcttatacgctgtcagcccaattctttctgtttcagacttctcttgatttccctctttttcatgtggcaaaagaagtagtgcgtacaatgtactgattcgtcctgagatttgtaccatggttgaaactaatttatggtaataatattaacatagcaaatctttagagactcaaatcatgaaaaggtaatagcagtactgtactaaaaacggtagtgctaattttcgtaataattttgtaaatattcaacagtaaaacaacttgaagacacactttcctagggaggcgttactgaaataatttagctatagtaagaaaatttgtaattttagaaatgccaagcattctaaattaattgcttgaaagtcactatgattgtgtccattataaggagacaaattcattcaagcaagttatttaatgttaaaggcccaattgttaggcagttaatggcacttttactattaactaatctttccatttgttcagacgtagcttaacttacctcttaggtgtgaatttggttaaggtcctcataatgtctttatgtgcagtttttgataggttattgtcatagaacttattctattcctacatttatgattactatggatgtatgagaataacacctaatccttatactttacctcaatttaactcctttataaagaacttacattacagaataaagattttttaaaaatatatttttttgtagagacagggtcttagcccagccgaggctggtctctaagtcctggcccaagcgatcctcctgcctgggcctcctaaagtgctggaattatagacatgagccatcacatccaatatacagaataaagatttttaatggaggatttaatgttcttcagaaaattttcttgaggtcagacaatgtcaaatgtctcctcagtttacactgagattttgaaaacaagtctgagctataggtccttgtgaagggtccattggaaatacttgttcaaagtaaaatggaaagcaaaggtaaaatcagcagttgaaattcagagaaagacagaaaaggagaaaagatgaaattcaacaggacagaagggaaatatattatcattaaggaggacagtatctgtagagctcattagtgatggcaaaatgacttggtcaggattatttttaacccgcttgtttctggtttgcacggctggggatgcagctagggttctgcctcagggagcacagctgtccagagcagctgtcagcctgcaagcctgaaacactccctcggtaaagtccttcctactcaggacagaaatgacgagaacagggagctggaaacaggcccctaaccagagaagggaagtaatggatcaacaaagttaactagcaggtcaggatcacgcaattcatttcactctgactggtaacatgtgacagaaacagtgtaggcttattgtattttcatgtagagtaggacccaaaaatccacccaaagtcctttatctatgccacatccttcttatctatacttccaggacactttttcttccttatgataaggctctctctctctccacacacacacacacacacacacacacacacacacacacacacacaaacacacaccccgccaaccaaggtgcatgtaaaaagatgtagattcctctgcctttctcatctacacagcccaggagggtaagttaatataagagggatttattggtaagagatgatgcttaatctgtttaacactgggcctcaaagagagaatttcttttcttctgtacttattaagcacctattatgtgttgagcttatatatacaaagggttattatatgctaatatagtaatagtaatggtggttggtactatggtaattaccataaaaattattatccttttaaaataaagctaattattattggatcttttttagtattcattttatgttttttatgtttttgattttttaaaagacaatctcaccctgttacccaggctggagtgcagtggtgcaatcatagctttctgcagtcttgaactcctgggctcaagcaatcctcctgccttggcctcccaaagtgttgggatacagtcatgagccactgcatctggcctaggatccatttagattaaaatatgcattttaaattttaaaataatatggctaatttttaccttatgtaatgtgtatactggcaataaatctagtttgctgcctaaagtttaaagtgctttccagtaagcttcatgtacgtgaggggagacatttaaagtgaaacagacagccaggtgtggtggctcacgcctgtaatcccagcactctgggaggctgaggtgggtggatcgcttgagccctggagttcaagaccagcctgagcaacatggcaaaacgctgtttctataacaaaaattagccgggcatggtggcatgtgcctgtggtcccagctactagggggctgaggcaggagaatcgttggagcccaggaggtcaaggctgcactgagcagtgcttgcgccactgcactccagcctgggtgacaggaccagaccttgcctcaaaaaaataagaagaaaaattaaaaataaatggaaacaactacaaagagctgttgtcctagatgagctacttagttaggctgatattttggtatttaacttttaaagtcagggtctgtcacctgcactacattattaaaatatcaattctcaatgtatatccacacaaagactggtacgtgaatgttcatagtacctttattcacaaaaccccaaagtagagactatccaaatatccatcaacaagtgaacaaataaacaaaatgtgctatatccatgcaatggaataccaccctgcagtacaaagaagctacttggggatgaatcccaaagtcatgacgctaaatgaaagagtcagacatgaaggaggagataatgtatgccatacgaaattctagaaaatgaaagtaacttatagttacagaaagcaaatcagggcaggcatagaggctcacacctgtaatcccagcactttgagaggccacgtgggaagattgctagaactcaggagttcaagaccagcctgggcaacacagtgaaactccattctccacaaaaatgggaaaaaaagaaagcaaatcagtggttgtcctgtggggaggggaaggactgcaaagagggaagaagctctggtggggtgagggtggtgattcaggttctgtatcctgactgtggtagcagtttggggtgtttacatccaaaaatattcgtagaattatgcatcttaaatgggtggagtttactgtatgtaaattatacctcaatgtaagaaaaaataatgtgtaagaaaactttcaattctcttgccagcaaacgttattcaaattcctgagccctttacttcgcaaattctctgcacttctgccccgtaccattaggtgacagcactagctccacaaattggataaatgcatttctggaaaagactagggacaaaatccaggcatcacttgtgctttcatatcaaccatgctgtacagcttgtgttgctgtctgcagctgcaatggggactcttgatttctttaaggaaacttgggttaccagagtatttccacaaatgctattcaaattagtgcttatgatatgcaagacactgtgctaggagccagaaaacaaagaggaggagaaatcagtcattatgtgggaacaacatagcaagatatttagatcattttgactagttaaaaaagcagcagagtacaaaatcacacatgcaatcagtataatccaaatcatgtaaatatgtgcctgtagaaagactagaggaataaacacaagaatcttaacagtcattgtcattagacactaagtctaattattattattagacactatgatatttgagatttaaaaaatctttaatattttaaaatttagagctcttctatttttccatagtattcaagtttgacaatgatcaagtattactctttctttttttttttttttttttttttttgagatggagttttggtcttgttgcccatgctggagtggaatggcatgaccatagctcactgcaacctccacctcctgggttcaagcaaagctgtcgcctcagcctcccgggtagatgggattacaggcgcccaccaccacactcggctaatgtttgtatttttagtagagatggggtttcaccatgttggccaggctggtctcaaactcctgacctcagaggatccacctgcctcagcctcccaaagtgctgggattacagatgtaggccactgcgcccggccaagtattgctcttatacattaaaaaacaggtgtgagccactgcgcccagccaggtattgctcttatacattaaaaaataggccggtgcagtggctcacgcctgtaatcccagcactttgggaagccaaggcgggcagaacacccgaggtcaggagtccaaggccagcctggccaagatggtgaaaccccgtctctattaaaaatacaaacattacctgggcatgatggtgggcgcctgtaatcccagctactcaggaggctgaggcaggaggatccgcggagcctggcagatctgcctgagcctgggaggttgaggctacagtaagccaagatcatgccagtatacttcagcctgggcgacaaagtgagaccgtaacaaaaaaaaaaaaatttaaaaaaagaaatttagatcaagatccaactgtaaaaagtggcctaaacaccacattaaagagtttggagtttattctgcaggcagaagagaaccatcagggggtcttcagcatgggaatggcatggtgcacctggtttttgtgagatcatggtggtgacagtgtggggaatgttattttggagggactggaggcagacagaccggttaaaaggccagcacaacagataaggaggaagaagatgagggcttggaccgaagcagagaagagcaaacagggaaggtacaaattcaagaaatattggggggtttgaatcaacacatttagatgattaattaaatatgaggactgaggaataagaaatgagtcaaggatggttccaggctgctaggctgcttacctgaggtggcaaagtcgggaggagtggcagtttaggacagggggcagttgaggaatattgttttgatcattttgagtttgaggtacaagttggacacttaggtaaagactggaggggaaatctgaatatacaattatgggactgaggaacaagtttattttattttttgtttcgttttcttgttgaagaacaaatttaattgtaatcccaagtcatcagcatctagaagacagtggcaggaggtgactgtcttgtgggtaagggtttggggtccttgatgagtatctctcaattggccttaaatataagcaggaaaaggagtttatgatggattccaggctcagcagggctcaggagggctcaggcagccagcagaggaagtcagagcatcttctttggtttagcccaagtaatgacttccttaaaaagctgaaggaaaatccagagtgaccagattataaactgtactcttgcattttctctccctcctctcacccacagcctcttgatgaaccggaggaagtttctttaccaattcaaaaatgtccgctgggctaagggtcggcgtgagacctacctgtgctacgtagtgaagaggcgtgacagtgctacatccttttcactggactttggttatcttcgcaataaggtatcaattaaagtcggctttgcaagcagtttaatggtcaactgtgagtgcttttagagccacctgctgatggtattacttccatccttttttggcatttgtgtctctatcacattcctcaaatccttttttttatttctttttccatgtccatgcacccatattagacatggcccaaaatatgtgatttaattcctccccagtaatgctgggcaccctaataccactccttccttcagtgccaagaacaactgctcccaaactgtttaccagctttcctcagcatctgaattgcctttgagattaattaagctaaaagcatttttatatgggagaatattatcagcttgtccaagcaaaaattttaaatgtgaaaaacaaattgtgtcttaagcatttttgaaaattaaggaagaagaatttgggaaaaaattaacggtggctcaattctgtcttccaaatgatttcttttccctcctactcacatgggtcgtaggccagtgaatacattcaacatggtgatccccagaaaactcagagaagcctcggctgatgattaattaaattgatctttcggctacccgagagaattacatttccaagagacttcttcaccaaaatccagatgggtttacataaacttctgcccacgggtatctcctctctcctaacacgctgtgacgtctgggcttggtggaatctcagggaagcatccgtggggtggaaggtcatcgtctggctcgttgtttgatggttatattaccatgcaattttctttgcctacatttgtattgaatacatcccaatctccttcctattcggtgacatgacacattctatttcagaaggctttgattttatcaagcactttcatttacttctcatggcagtgcctattacttctcttacaatacccatctgtctgctttaccaaaatctatttccccttttcagatcctcccaaatggtcctcataaactgtcctgcctccacctagtggtccaggtatatttccacaatgttacatcaacaggcacttctagccattttccttctcaaaaggtgcaaaaagcaacttcataaacacaaattaaatcttcggtgaggtagtgtgatgctgcttcctcccaactcagcgcacttcgtcttcctcattccacaaaaacccatagccttccttcactctgcaggactagtgctgccaagggttcagctctacctactggtgtgctcttttgagcaagttgcttagcctctctgtaacacaaggacaatagctgcaagcatccccaaagatcattgcaggagacaatgactaaggctaccagagccgcaataaaagtcagtgaattttagcgtggtcctctctgtctctccagaacggctgccacgtggaattgctcttcctccgctacatctcggactgggacctagaccctggccgctgctaccgcgtcacctggttcacctcctggagcccctgctacgactgtgcccgacatgtggccgactttctgcgagggaaccccaacctcagtctgaggatcttcaccgcgcgcctctacttctgtgaggaccgcaaggctgagcccgaggggctgcggcggctgcaccgcgccggggtgcaaatagccatcatgaccttcaaaggtgcgaaagggccttccgcgcaggcgcagtgcagcagcccgcattcgggattgcgatgcggaatgaatgagttagtggggaagctcgaggggaagaagtgggcggggattctggttcacctctggagccgaaattaaagattagaagcagagaaaagagtgaatggctcagagacaaggccccgaggaaatgagaaaatggggccagggttgcttctttcccctcgatttggaacctgaactgtcttctacccccatatccccgcctttttttcctttttttttttttgaagattatttttactgctggaatacttttgtagaaaaccacgaaagaactttcaaagcctgggaagggctgcatgaaaattcagttcgtctctccagacagcttcggcgcatccttttggtaaggggcttcctcgctttttaaattttctttctttctctacagtcttttttggagtttcgtatatttcttatattttcttattgttcaatcactctcagttttcatctgatgaaaactttatttctcctccacatcagctttttcttctgctgtttcaccattcagagccctctgctaaggttccttttccctcccttttctttcttttgttgtttcacatctttaaatttctgtctctccccagggttgcgtttccttcctggtcagaattcttttctcctttttttttttttttttttttttttttaaacaaacaaacaaaaaacccaaaaaaactctttcccaatttactttcttccaacatgttacaaagccatccactcagtttagaagactctccggccccaccgacccccaacctcgttttgaagccattcactcaatttgcttctctctttctctacagcccctgtatgaggttgatgacttacgagacgcatttcgtactttgggactttgatagcaacttccaggaatgtcacacacgatgaaatatctctgctgaagacagtggataaaaaacagtccttcaagtcttctctgtttttattcttcaactctcactttcttagagtttacagaaaaaatatttatatacgactctttaaaaagatctatgtcttgaaaatagagaaggaacacaggtctggccagggacgtgctgcaattggtgcagttttgaatgcaacattgtcccctactgggaataacagaactgcaggacctgggagcatcctaaagtgtcaacgtttttctatgacttttaggtaggatgagagcagaaggtagatcctaaaaagcatggtgagaggatcaaatgtttttatatcaacatcctttattatttgattcatttgagttaacagtggtgttagtgatagatttttctattcttttcccttgacgtttactttcaagtaacacaaactcttccatcaggccatgatctataggacctcctaatgagagtatctgggtgattgtgaccccaaaccatctctccaaagcattaatatccaatcatgcgctgtatgttttaatcagcagaagcatgtttttatgtttgtacaaaagaagattgttatgggtggggatggaggtatagaccatgcatggtcaccttcaagctactttaataaaggatcttaaaatgggcaggaggactgtgaacaagacaccctaataatgggttgatgtctgaagtagcaaatcttctggaaacgcaaactcttttaaggaagtccctaatttagaaacacccacaaacttcacatatcataattagcaaacaattggaaggaagttgcttgaatgttggggagaggaaaatctattggctctcgtgggtctcttcatctcagaaatgccaatcaggtcaaggtttgctacattttgtatgtgtgtgatgcttctcccaaaggtatattaactatataagagagttgtgacaaaacagaatgataaagctgcgaaccgtggcacacgctcatagttctagctgcttgggaggttgaggagggaggatggcttgaacacaggtgttcaaggccagcctgggcaacataacaagatcctgtctctcaaaaaaaaaaaaaaaaaaaagaaagagagagggccgggcgtggtggctcacgcctgtaatcccagcactttgggaggccgagccgggcggatcacctgtggtcaggagtttgagaccagcctggccaacatggcaaaaccccgtctgtactcaaaatgcaaaaattagccaggcgtggtagcaggcacctgtaatcccagctacttgggaggctgaggcaggagaatcgcttgaacccaggaggtggaggttgcagtaagctgagatcgtgccgttgcactccagcctgggcgacaagagcaagactctgtctcagaaaaaaaaaaaaaaaagagagagagagagaaagagaacaatatttgggagagaaggatggggaagcattgcaaggaaattgtgctttatccaacaaaatgtaaggagccaataagggatccctatttgtctcttttggtgtctatttgtccctaacaactgtctttgacagtgagaaaaatattcagaataaccatatccctgtgccgttattacctagcaacccttgcaatgaagatgagcagatccacaggaaaacttgaatgcacaactgtcttattttaatcttattgtacataagtttgtaaaagagttaaaaattgttacttcatgtattcatttatattttatattattttgcgtctaatgattttttattaacatgatttccttttctgatatattgaaatggagtctcaaagcttcataaatttataactttagaaatgattctaataacaacgtatgtaattgtaacattgcagtaatggtgctacgaagccatttctcttgatttttagtaaacttttatgacagcaaatttgcttctggctcactttcaatcagttaaataaatgataaataattttggaagctgtgaagataaaataccaaataaaataatataaaagtgatttatatgaagttaaaataaaaaatcagtatgatggaataaacttg

SEQ ID NO: 16 - protein, 198 aa, Homo sapiens [sequence omitted]

SEQ ID NO: 17 - protein, 198 aa, Canis lupus
  REGION 1..198: note = MISC_FEATURE - Canine AID (clAID) polypeptide sequence
  REGION 1..30: note = MISC_FEATURE - Nuclear localization sequence
  REGION 183..198: note = MISC_FEATURE - Nuclear export signal
MDSLLMKQRKFLYHFKNVRWAKGRHETYLCYVVKRRDSATSFSLDFGHLRNKSGCHVELLFLRYISDWDLDPGRCYRVTWFTSWSPCYDCARHVADFLRGYPNLSLRIFAARLYFCEDRKAEPEGLRRLHRAGVQIAIMTFKDYFYCWNTFVENREKTFKAWEGLHENSVRLSRQLRRILLPLYEVDDLRDAFRTLGL

SEQ ID NO: 18 - protein, 199 aa, Bos taurus
  REGION 1..199: note = MISC_FEATURE - Bovine AID (btAID) polypeptide sequence
  REGION 1..30: note = MISC_FEATURE - Nuclear localization sequence
  REGION 183..199: note = MISC_FEATURE - Nuclear export signal
MDSLLKKQRQFLYQFKNVRWAKGRHETYLCYVVKRRDSPTSFSLDFGHLRNKAGCHVELLFLRYISDWDLDPGRCYRVTWFTSWSPCYDCARHVADFLRGYPNLSLRIFTARLYFCDKERKAEPEGLRRLHRAGVQIAIMTFKDYFYCWNTFVENHERTFKAWEGLHENSVRLSRQLRRILLPLYEVDDLRDAFRTLGL

SEQ ID NO: 19 - protein, 239 aa, Rattus sp.
  REGION 1..239: note = MISC_FEATURE - Rat AID polypeptide sequence
  REGION 1..26: note = MISC_FEATURE - Nuclear localization sequence
  REGION 194..239: note = MISC_FEATURE - Nuclear export signal
MAVGSKPKAALVGPHWERERIWCFLCSTGLGTQQTGQTSRWLRPAATQDPVSPPRSLLMKQRKFLYHFKNVRWAKGRHETYLCYVVKRRDSATSFSLDFGYLRNKSGCHVELLFLRYISDWDLDPGRCYRVTWFTSWSPCYDCARHVADFLRGNPNLSLRIFTARLTGWGALPAGLMSPARPSDYFYCWNTFVENHERTFKAWEGLHENSVRLSRRLRRILLPLYEVDDLRDAFRTLGL

SEQ ID NO: 20 - protein, 198 aa, Mus musculus [sequence omitted]

SEQ ID NO: 21 - protein, 229 aa, Rattus norvegicus [sequence omitted]

SEQ ID NO: 22 - protein, 229 aa, Mesocricetus auratus
  REGION 1..229: note = MISC_FEATURE - maAPOBEC-1 polypeptide sequence
MSSETGPVVVDPTLRRRIEPHEFDAFFDQGELRKETCLLYEIRWGGRHNIWRHTGQNTSRHVEINFIEKFTSERYFYPSTRCSIVWFLSWSPCGECSKAITEFLSGHPNVTLFIYAARLYHHTDQRNRQGLRDLISRGVTIRIMTEQEYCYCWRNFVNYPPSNEVYWPRYPNLWMRLYALELYCIHLGLPPCLKIKRRHQYPLTFFRLNLQSCHYQRIPPHILWATGFI

SEQ ID NO: 23 - protein, 236 aa, Pongo pygmaeus
  REGION 1..236: note = MISC_FEATURE - ppAPOBEC-1 polypeptide sequence
MTSEKGPSTGDPTLRRRIESWEFDVFYDPRELRKETCLLYEIKWGMSRKIWRSSGKNTTNHVEVNFIKKFTSERRFHSSISCSITWFLSWSPCWECSQAIREFLSQHPGVTLVIYVARLFWHMDQRNRQGLRDLVNSGVTIQIMRASEYYHCWRNFVNYPPGDEAHWPQYPPLWMMLYALELHCIILSLPPCLKISRRWQNHLAFFRLHLQNCHYQTIPPHILLATGLIHPSVTWR

SEQ ID NO: 24 - protein, 236 aa, Oryctolagus cuniculus
  REGION 1..236: note = MISC_FEATURE - ocAPOBEC1 polypeptide sequence
MASEKGPSNKDYTLRRRIEPWEFEVFFDPQELRKEACLLYEIKWGASSKTWRSSGKNTTNHVEVNFLEKLTSEGRLGPSTCCSITWFLSWSPCWECSMAIREFLSQHPGVTLIIFVARLFQHMDRRNRQGLKDLVTSGVTVRVMSVSEYCYCWENFVNYPPGKAAQWPRYPPRWMLMYALELYCIILGLPPCLKISRRHQKQLTFFSLTPQYCHYKMIPPYILLATGLLQPSVPWR

SEQ ID NO: 25 - protein, 235 aa, Monodelphis domestica
  REGION 1..235: note = MISC_FEATURE - mdAPOBEC-1 polypeptide sequence
MNSKTGPSVGDATLRRRIKPWEFVAFFNPQELRKETCLLYEIKWGNQNIWRHSNQNTSQHAEINFMEKFTAERHFNSSVRCSITWFLSWSPCWECSKAIRKFLDHYPNVTLAIFISRLYWHMDQQHRQGLKELVHSGVTIQIMSYSEYHYCWRNFVDYPQGEEDYWPKYPYLWIMLYVLELHCIILGLPPCLKISGSHSNQLALFSLDLQDCHYQKIPYNVLVATGLVQPFVTWR

SEQ ID NO: 26 - protein, 224 aa, Pongo pygmaeus
  REGION 1..224: note = MISC_FEATURE - ppAPOBEC-2 polypeptide sequence
MAQKEEAAAATEAASQNGEDLENLDDPEKLKELIELPPFEIVTGERLPANFFKFQFRNVEYSSGRNKTFLCYVVEAQGKGGQVQASRGYLEDEHAAAHAEEAFFNTILPAFDPALRYNVTWYVSSSPCAACADRIIKTLSKTKNLRLLILVGRLFMWEELEIQDALKKLKEAGCKLRIMKPQDFEYVWQNFVEQEEGESKAFQPWEDIQENFLYYEEKLADILK

SEQ ID NO: 27 - protein, 224 aa, Bos taurus
  REGION 1..224: note = MISC_FEATURE - btAPOBEC-2 polypeptide sequence
MAQKEEAAAAAEPASQNGEEVENLEDPEKLKELIELPPFEIVTGERLPAHYFKFQFRNVEYSSGRNKTFLCYVVEAQSKGGQVQASRGYLEDEHATNHAEEAFFNSIMPTFDPALRYMVTWYVSSSPCAACADRIVKTLNKTKNLRLLILVGRLFMWEEPEIQAALRKLKEAGCRLRIMKPQDFEYIWQNFVEQEEGESKAFEPWEDIQENFLYYEEKLADILK

SEQ ID NO: 28 - protein, 440 aa, Mus musculus
  REGION 1..440: note = MISC_FEATURE - mAPOBEC-3-(1) polypeptide sequence
MQPQRLGPRAGMGPFCLGCSHRKCYSPIRNLISQETFKFHFKNLGYAKGRKDTFLCYEVTRKDCDSPVSLHHGVFKNKDNIHAEICFLYWFHDKVLKVLSPREEFKITWYMSWSPCFECAEQIVRFLATHHNLSLDIFSSRLYNVQDPETQQNLCRLVQEGAQVAAMDLYEFKKCWKKFVDNGGRRFRPWKRLLTNFRYQDSKLQEILRPCYISVPSSSSSTLSNICLTKGLPETRFWVEGRRMDPLSEEEFYSQFYNQRVKHLCYYHRMKPYLCYQLEQFNGQAPLKGCLLSEKGKQHAEILFLDKIRSMELSQVTITCYLTWSPCPNCAWQLAAFKRDRPDLILHIYTSRLYFHWKRPFQKGLCSLWQSGILVDVMDLPQFTDCWTNFVNPKRPFWPWKGLEIISRRTQRRLRRIKESWGLQDLVNDFGNLQLGPPMS

SEQ ID NO: 29 - protein, 429 aa, Mus musculus
  REGION 1..429: note = MISC_FEATURE - APOBEC-3-(2) (Mouse APOBEC-3) polypeptide sequence
  REGION 71..108: note = MISC_FEATURE - Nucleic acid editing domain
  REGION 288..319: note = MISC_FEATURE - Nucleic acid editing domain
MGPFCLGCSHRKCYSPIRNLISQETFKFHFKNLGYAKGRKDTFLCYEVTRKDCDSPVSLHHGVFKNKDNIHAEICFLYWFHDKVLKVLSPREEFKITWYMSWSPCFECAEQIVRFLATHHNLSLDIFSSRLYNVQDPETQQNLCRLVQEGAQVAAMDLYEFKKCWKKFVDNGGRRFRPWKRLLTNFRYQDSKLQEILRPCYIPVPSSSSSTLSNICLTKGLPETRFCVEGRRMDPLSEEEFYSQFYNQRVKHLCYYHRMKPYLCYQLEQFNGQAPLKGCLLSEKGKQHAEILFLDKIRSMELSQVTITCYLTWSPCPNCAWQLAAFKRDRPDLILHIYTSRLYFHWKRPFQKGLCSLWQSGILVDVMDLPQFTDCWTNFVNPKRPFWPWKGLEIISRRTQRRLRRIKESWGLQDLVNDFGNLQLGPPMS

SEQ ID NO: 30 - protein, 430 aa, Rattus sp.
  REGION 1..430: note = MISC_FEATURE - APOBEC-3 polypeptide sequence
  REGION 72..109: note = MISC_FEATURE - Nucleic acid editing domain
  REGION 289..320: note = MISC_FEATURE - Nucleic acid editing domain
MGPFCLGCSHRKCYSPIRNLISQETFKFHFKNRLRYAIDRKDTFLCYEVTRKDCDSPVSLHHGVFKNKDNIHAEICFLYWFHDKVLKVLSPREEFKITWYMSWSPCFECAEQVLRFLATHHNLSLDIFSSRLYNIRDPENQQNLCRLVQEGAQVAAMDLYEFKKCWKKFVDNGGRRFRPWKKLLTNFRYQDSKLQEILRPCYIPVPSSSSSTLSNICLTKGLPETRFCVERRRVHLLSEEEFYSQFYNQRVKHLCYYHGVKPYLCYQLEQFNGQAPLKGCLLSEKGKQHAEILFLDKIRSMELSQVIITCYLTWSPCPNCAWQLAAFKRDRPDLILHIYTSRLYFHWKRPFQKGLCSLWQSGILVDVMDLPQFTDCWTNFVNPKRPFWPWKGLEIISRRTQRRLHRIKESWGLQDLVNDFGNLQLGPPMS

SEQ ID NO: 31 - protein, 199 aa, Homo sapiens
  REGION 1..199: note = MISC_FEATURE - hAPOBEC-3A polypeptide sequence
  REGION 70..106: note = MISC_FEATURE - Nucleic acid editing domain
MEASPASGPRHLMDPHIFTSNFNNGIGRHKTYLCYEVERLDNGTSVKMDQHRGFLHNQAKNLLCGFYGRHAELRFLDLVPSLQLDPAQIYRVTWFISWSPCFSWGCAGEVRAFLQENTHVRLRIFAARIYDYDPLYKEALQMLRDAGAQVSIMTYDEFKHCWDTFVDHQGCPFQPWDGLDEHSQALSGRLRAILQNQGN

SEQ ID NO: 32 - protein, 373 aa, Homo sapiens
  REGION 1..373: note = MISC_FEATURE - hAPOBEC-3F polypeptide sequence
  REGION 65..99: note = MISC_FEATURE - Nucleic acid editing domain
  REGION 248..283: note = MISC_FEATURE - Nucleic acid editing domain
MKPHFRNTVERMYRDTFSYNFYNRPILSRRNTVWLCYEVKTKGPSRPRLDAKIFRGQVYSQPEHHAEMCFLSWFCGNQLPAYKCFQITWFVSWTPCPDCVAKLAEFLAEHPNVTLTISAARLYYYWERDYRRALCRLSQAGARVKIMDDEEFAYCWENFVYSEGQPFMPWYKFDDNYAFLHRTLKEILRNPMEAMYPHIFYFHFKNLRKAYGRNESWLCFTMEVVKHHSPVSWKRGVFRNQVDPETHCHAERCFLSWFCDDILSPNTNYEVTWYTSWSPCPECAGEVAEFLARHSNVNLTIFTARLYYFWDTDYQEGLRSLSQEGASVEIMGYKDFKYCWENFVYNDDEPFKPWKGLKYNFLFLDSKLQEILE

SEQ ID NO: 33 - protein, 370 aa, Macaca mulatta
  REGION 1..370: note = MISC_FEATURE - Rhesus macaque APOBEC-3G polypeptide sequence
  REGION 1..61: note = MISC_FEATURE - Cytoplasmic localization signal
MVEPMDPRTFVSNFNNRPILSGLNTVWLCCEVKTKDPSGPPLDAKIFQGKVYSKAKYHPEMRFLRWFHKWRQLHHDQEYKVTWYVSWSPCTRCANSVATFLAKDPKVTLTIFVARLYYFWKPDYQQALRILCQKRGGPHATMKIMNYNEFQDCWNKFVDGRGKPFKPRNNLPKHYTLLQATLGELLRHLMDPGTFTSNFNNKPWVSGQHETYLCYKVERLHNDTWVPLNQHRGFLRNQAPNIHGFPKGRHAELCFLDLIPFWKLDGQQYRVTCFTSWSPCFSCAQEMAKFISNNEHVSLCIFAARIYDDQGRYQEGLRALHRDGAKIAMMNYSEFEYCWDTFVDRQGRPFQPWDGLDEHSQALSGRLRAI

SEQ ID NO: 34 - protein, 384 aa, Pan troglodytes
  REGION 1..384: note = MISC_FEATURE - Chimpanzee APOBEC-3G polypeptide sequence
  REGION 1..60: note = MISC_FEATURE - Cytoplasmic localization signal
  REGION 65..100: note = MISC_FEATURE - Nucleic acid editing domain
  REGION 257..291: note = MISC_FEATURE - Nucleic acid editing domain
MKPHFRNPVERMYQDTFSDNFYNRPILSHRNTVWLCYEVKTKGPSRPPLDAKIFRGQVYSKLKYHPEMRFFHWFSKWRKLHRDQEYEVTWYISWSPCTKCTRDVATFLAEDPKVTLTIFVARLYYFWDPDYQEALRSLCQKRDGPRATMKIMNYDEFQHCWSKFVYSQRELFEPWNNLPKYYILLHIMLGEILRHSMDPPTFTSNFNNELWVRGRHETYLCYEVERLHNDTWVLLNQRRGFLCNQAPHKHGFLEGRHAELCFLDVIPFWKLDLHQDYRVTCFTSWSPCFSCAQEMAKFISNNKHVSLCIFAARIYDDQGRCQEGLRTLAKAGAKISIMTYSEFKHCWDTFVDHQGCPFQPWDGLEEHSQALSGRLRAILQNQGN

SEQ ID NO: 35 - protein, 377 aa, Chlorocebus sabaeus
  REGION 1..377: note = MISC_FEATURE - Green monkey APOBEC-3G polypeptide sequence
  REGION 1..60: note = MISC_FEATURE - Cytoplasmic localization signal
  REGION 65..100: note = MISC_FEATURE - Nucleic acid editing domain
  REGION 257..290: note = MISC_FEATURE - Nucleic acid editing domain
MNPQIRNMVEQMEPDIFVYYFNNRPILSGRNTVWLCYEVKTKDPSGPPLDANIFQGKLYPEAKDHPEMKFLHWFRKWRQLHRDQEYEVTWYVSWSPCTRCANSVATFLAEDPKVTLTIFVARLYYFWKPDYQQALRILCQERGGPHATMKIMNYNEFQHCWNEFVDGQGKPFKPRKNLPKHYTLLHATLGELLRHVMDPGTFTSNFNNKPWVSGQRETYLCYKVERSHNDTWVLLNQHRGFLRNQAPDRHGFPKGRHAELCFLDLIPFWKLDDQQYRVTCFTSWSPCFSCAQKMAKFISNNKHVSLCIFAARIYDDQGRCQEGLRTLHRDGAKIAVMNYSEFEYCWDTFVDRQGRPFQPWDGLDEHSQALSGRLRAI

SEQ ID NO: 36 - protein, 384 aa, Homo sapiens
  REGION 1..384: note = MISC_FEATURE - Human APOBEC-3G polypeptide sequence
  REGION 1..60: note = MISC_FEATURE - Cytoplasmic localization signal
  REGION 65..100: note = MISC_FEATURE - Nucleic acid editing domain
  REGION 257..291: note = MISC_FEATURE - Nucleic acid editing domain
MKPHFRNTVERMYRDTFSYNFYNRPILSRRNTVWLCYEVKTKGPSRPPLDAKIFRGQVYSELKYHPEMRFFHWFSKWRKLHRDQEYEVTWYISWSPCTKCTRDMATFLAEDPKVTLTIFVARLYYFWDPDYQEALRSLCQKRDGPRATMKIMNYDEFQHCWSKFVYSQRELFEPWNNLPKYYILLHIMLGEILRHSMDPPTFTFNFNNEPWVRGRHETYLCYEVERMHNDTWVLLNQRRGFLCNQAPHKHGFLEGRHAELCFLDVIPFWKLDLDQDYRVTCFTSWSPCFSCAQEMAKFISKNKHVSLCIFTARIYDDQGRCQEGLRTLAEAGAKISIMTYSEFKHCWDTFVDHQGCPFQPWDGLDEHSQDLSGRLRAILQNQEN

SEQ ID NO: 37 - protein, 382 aa, Homo sapiens
  REGION 1..382: note = MISC_FEATURE - Human APOBEC-3B polypeptide sequence
  REGION 66..100: note = MISC_FEATURE - Nucleic acid editing domain
  REGION 251..289: note = MISC_FEATURE - Nucleic acid editing domain
MNPQIRNPMERMYRDTFYDNFENEPILYGRSYTWLCYEVKIKRGRSNLLWDTGVFRGQVYFKPQYHAEMCFLSWFCGNQLPAYKCFQITWFVSWTPCPDCVAKLAEFLSEHPNVTLTISAARLYYYWERDYRRALCRLSQAGARVTIMDYEEFAYCWENFVYNEGQQFMPWYKFDENYAFLHRTLKEILRYLMDPDTFTFNFNNDPLVLRRRQTYLCYEVERLDNGTWVLMDQHMGFLCNEAKNLLCGFYGRHAELRFLDLVPSLQLDPAQIYRVTWFISWSPCFSWGCAGEVRAFLQENTHVRLRIFAARIYDYDPLYKEALQMLRDAGAQVSIMTYDEFEYCWDTFVYRQGCPFQPWDGLEEHSQALSGRLRAILQNQGN

SEQ ID NO: 38 - protein, 395 aa, Rattus sp.
  REGION 1..395: note = MISC_FEATURE - Rat APOBEC-3B polypeptide sequence
MQPQGLGPNAGMGPVCLGCSHRRPYSPIRNPLKKLYQQTFYFHFKNVRYAWGRKNNFLCYEVNGMDCALPVPLRQGVFRKQGHIHAELCFIYWFHDKVLRVLSPMEEFKVTWYMSWSPCSKCAEQVARFLAAHRNLSLAIFSSRLYYYLRNPNYQQKLCRLIQEGVHVAAMDLPEFKKCWNKFVDNDGQPFRPWMRLRINFSFYDCKLQEIFSRMNLLREDVFYLQFNNSHRVKPVQNRYYRRKSYLCYQLERANGQEPLKGYLLYKKGEQHVEILFLEKMRSMELSQVRITCYLTWSPCPNCARQLAAFKKDHPDLILRIYTSRLYFWRKKFQKGLCTLWRSGIHVDVMDLPQFADCWTNFVNPQRPFRPWNELEKNSWRIQRRLRRIKESWGL

SEQ ID NO: 39 - protein, 226 aa, Bos taurus
  REGION 1..226: note = MISC_FEATURE - Bovine APOBEC-3B polypeptide sequence
DGWEVAFRSGTVLKAGVLGVSMTEGWAGSGHPGQGACVWTPGTRNTMNLLREVLFKQQFGNQPRVPAPYYRRKTYLCYQLKQRNDLTLDRGCFRNKKQRHAERFIDKINSLDLNPSQSYKIICYITWSPCPNCANELVNFITRNNHLKLEIFASRLYFHWIKSFKMGLQDLQNAGISVAVMTHTEFEDCWEQFVDNQSRPFQPWDKLEQYSASIRRRLQRILTAPI

SEQ ID NO: 40 - protein, 490 aa, Pan troglodytes
  REGION 1..490: note = MISC_FEATURE - Chimpanzee APOBEC-3B polypeptide sequence
MNPQIRNPMEWMYQRTFYYNFENEPILYGRSYTWLCYEVKIRRGHSNLLWDTGVFRGQMYSQPEHHAEMCFLSWFCGNQLSAYKCFQITWFVSWTPCPDCVAKLAKFLAEHPNVTLTISAARLYYYWERDYRRALCRLSQAGARVKIMDDEEFAYCWENFVYNEGQPFMPWYKFDDNYAFLHRTLKEIIRHLMDPDTFTFNFNNDPLVLRRHQTYLCYEVERLDNGTWVLMDQHMGFLCNEAKNLLCGFYGRHAELRFLDLVPSLQLDPAQIYRVTWFISWSPCFSWGCAGQVRAFLQENTHVRLRIFAARIYDYDPLYKEALQMLRDAGAQVSIMTYDEFEYCWDTFVYRQGCPFQPWDGLEEHSQALSGRLRAILQVRASSLCMVPHRPPPPPQSPGPCLPLCSEPPLGSLLPTGRPAPSLPFLLTASFSFPPPASLPPLPSLSLSPGHLPVPSFHSLTSCSIQPPCSSRIRETEGWASVSKEGRDLG

SEQ ID NO: 41 - protein, 190 aa, Homo sapiens
  REGION 1..190: note = MISC_FEATURE - Human APOBEC-3C polypeptide sequence
  REGION 65..100: note = MISC_FEATURE - Nucleic acid editing domain
MNPQIRNPMKAMYPGTFYFQFKNLWEANDRNETWLCFTVEGIKRRSVVSWKTGVFRNQVDSETHCHAERCFLSWFCDDILSPNTKYQVTWYTSWSPCPDCAGEVAEFLARHSNVNLTIFTARLYYFQYPCYQEGLRSLSQEGVAVEIMDYEDFKYCWENFVYNDNEPFKPWKGLKTNFRLLKRRLRESLQ

SEQ ID NO: 42 - protein, 190 aa, Gorilla sp.
  REGION 1..190: note = MISC_FEATURE - Gorilla APOBEC-3C polypeptide sequence
  REGION 65..100: note = MISC_FEATURE - Nucleic acid editing domain
MNPQIRNPMKAMYPGTFYFQFKNLWEANDRNETWLCFTVEGIKRRSVVSWKTGVFRNQVDSETHCHAERCFLSWECDDILSPNTNYQVTWYTSWSPCPECAGEVAEFLARHSNVNLTIFTARLYYFQDTDYQEGLRSLSQEGVAVKIMDYKDFKYCWENFVYNDDEPFKPWKGLKYNFRFLKRRLQEILE

SEQ ID NO: 43 - protein, 202 aa, Macaca mulatta
  REGION 1..202: note = MISC_FEATURE - Rhesus macaque APOBEC-3A polypeptide sequence
  REGION 72..103: note = MISC_FEATURE - Nucleic acid editing domain
MDGSPASRPRHLMDPNTFTFNFNNDLSVRGRHQTYLCYEVERLDNGTWVPMDERRGFLCNKAKNVPCGDYGCHVELRFLCEVPSWQLDPAQTYRVTWFISWSPCFRRGCAGQVRVFLQENKHVRLRIFAARIYDYDPLYQEALRTLRDAGAQVSIMTYEEFKHCWDTFVDRQGRPFQPWDGLDEHSQALSGRLRAILQNQGN

SEQ ID NO: 44 - protein, 185 aa, Bos taurus
  REGION 1..185: note = MISC_FEATURE - Bovine APOBEC-3A polypeptide sequence
  REGION 56..86: note = MISC_FEATURE - Nucleic acid editing domain
MDEYTFTENFNNQGWPSKTYLCYEMERLDGDATIPLDEYKGFVRNKGLDQPEKPCHAELYFLGKIHSWNLDRNQHYRLTCFISWSPCYDCAQKLTTFLKENHHISLHILASRIYTHNRFGCHQSGLCELQAAGARITIMTFEDFKHCWETFVDHKGKPFQPWEGLNVKSQALCTELQAILKTQQN

SEQ ID NO: 45 - protein, 200 aa, Homo sapiens
  REGION 1..200: note = MISC_FEATURE - Human APOBEC-3H polypeptide sequence
  REGION 54..88: note = MISC_FEATURE - Nucleic acid editing domain
MALLTAETFRLQFNNKRRLRRPYYPRKALLCYQLTPQNGSTPTRGYFENKKKCHAEICFINEIKSMGLDETQCYQVTCYLTWSPCSSCAWELVDFIKAHDHLNLGIFASRLYYHWCKPQQKGLRLLCGSQVPVEVMGFPKFADCWENFVDHEKPLSFNPYKMLEELDKNSRAIKRRLERIKIPGVRAQGRYMDILCDAEV

SEQ ID NO: 46 - protein, 210 aa, Macaca mulatta
  REGION 1..210: note = MISC_FEATURE - Rhesus macaque APOBEC-3H polypeptide sequence
MALLTAKTFSLQFNNKRRVNKPYYPRKALLCYQLTPQNGSTPTRGHLKNKKKDHAEIRFINKIKSMGLDETQCYQVTCYLTWSPCPSCAGELVDFIKAHRHLNLRIFASRLYYHWRPNYQEGLLLLCGSQVPVEVMGLPEFTDCWENFVDHKEPPSFNPSEKLEELDKNSQAIKRRLERIKSRSVDVLENGLRSLQLGPVTPSSSIRNSR

SEQ ID NO: 47 - protein, 386 aa, Homo sapiens
  REGION 1..386: note = MISC_FEATURE - Human APOBEC-3D polypeptide sequence
  REGION 78..109: note = MISC_FEATURE - Nucleic acid editing domain
  REGION 262..296: note = MISC_FEATURE - Nucleic acid editing domain
MNPQIRNPMERMYRDTFYDNFENEPILYGRSYTWLCYEVKIKRGRSNLLWDTGVFRGPVLPKRQSNHRQEVYFRFENHAEMCFLSWFCGNRLPANRRFQITWFVSWNPCLPCVVKVTKFLAEHPNVTLTISAARLYYYRDRDWRWVLLRLHKAGARVKIMDYEDFAYCWENFVCNEGQPFMPWYKFDDNYASLHRTLKEILRNPMEAMYPHIFYFHFKNLLKACGRNESWLCFTMEVTKHHSAVFRKRGVFRNQVDPETHCHAERCFLSWFCDDILSPNTNYEVTWYTSWSPCPECAGEVAEFLARHSNVNLTIFTARLCYFWDTDYQEGLCSLSQEGASVKIMGYKDFVSCWKNFVYSDDEPFKPWKGLQTNFRLLKRRLREILQ

SEQ ID NO: 48 - protein, 236 aa, Homo sapiens
  REGION 1..236: note = MISC_FEATURE - Human APOBEC-1 polypeptide sequence
MTSEKGPSTGDPTLRRRIEPWEFDVFYDPRELRKEACLLYEIKWGMSRKIWRSSGKNTTNHVEVNFIKKFTSERDFHPSMSCSITWFLSWSPCWECSQAIREFLSRHPGVTLVIYVARLFWHMDQQNRQGLRDLVNSGVTIQIMRASEYYHCWRNFVNYPPGDEAHWPQYPPLWMMLYALELHCIILSLPPCLKISRRWQNHLTFFRLHLQNCHYQTIPPHILLATGLIHPSVAWR

SEQ ID NO: 49 - protein, 229 aa, Mus musculus
  REGION 1..229: note = MISC_FEATURE - Mouse APOBEC-1 polypeptide sequence
MSSETGPVAVDPTLRRRIEPHEFEVFFDPRELRKETCLLYEINWGGRHSVWRHTSQNTSNHVEVNFLEKFTTERYFRPNTRCSITWFLSWSPCGECSRAITEFLSRHPYVTLFIYIARLYHHTDQRNRQGLRDLISSGVTIQIMTEQEYCYCWRNFVNYPPSNEAYWPRYPHLWVKLYVLELYCIILGLPPCLKILRRKQPQLTFFTITLQTCHYQRIPPHLLWATGLK

SEQ ID NO: 50 - protein, 224 aa, Homo sapiens
  REGION 1..224: note = MISC_FEATURE - Human APOBEC-2 polypeptide sequence
MAQKEEAAVATEAASQNGEDLENLDDPEKLKELIELPPFEIVTGERLPANFFKFQFRNVEYSSGRNKTFLCYVVEAQGKGGQVQASRGYLEDEHAAAHAEEAFFNTILPAFDPALRYNVTWYVSSSPCAACADRIIKTLSKTKNLRLLILVGRLFMWEEPEIQAALKKLKEAGCKLRIMKPQDFEYVWQNFVEQEEGESKAFQPWEDIQENFLYYEEKLADILK

SEQ ID NO: 51 - protein, 224 aa, Mus musculus
  REGION 1..224: note = MISC_FEATURE - Mouse APOBEC-2 polypeptide sequence
MAQKEEAAEAAAPASQNGDDLENLEDPEKLKELIDLPPFEIVTGVRLPVNFFKFQFRNVEYSSGRNKTFLCYVVEVQSKGGQAQATQGYLEDEHAGAHAEEAFFNTILPAFDPALKYNVTWYVSSSPCAACADRILKTLSKTKNLRLLILVSRLFMWEEPEVQAALKKLKEAGCKLRIMKPQDFEYIWQNFVEQEEGESKAFEPWEDIQENFLYYEEKLADILK

SEQ ID NO: 52 - protein, 224 aa, Rattus sp.
  REGION 1..224: note = MISC_FEATURE - Rat APOBEC-2 polypeptide sequence
MAQKEEAAEAAAPASQNGDDLENLEDPEKLKELIDLPPFEIVTGVRLPVNFFKFQFRNVEYSSGRNKTFLCYVVEAQSKGGQVQATQGYLEDEHAGAHAEEAFFNTILPAFDPALKYNVTWYVSSSPCAACADRILKTLSKTKNLRLLILVSRLFMWEEPEVQAALKKLKEAGCKLRIMKPQDFEYLWQNFVEQEEGESKAFEPWEDIQENFLYYEEKLADILK

SEQ ID NO: 53 - protein, 208 aa, Petromyzon marinus
  REGION 1..208: note = MISC_FEATURE - Petromyzon marinus CDA1 (pmCDAl) polypeptide sequence
MTDAEYVRIHEKLDIYTFKKQFFNNKKSVSHRCYVLFELKRRGERRACFWGYAVNKPQSGTERGIHAEIFSIRKVEEYLRDNPGQFTINWYSSWSPCADCAEKILEWYNQELRGNGHTLKIWACKLYYEKNARNQIGLWNLRDNGVGLNVMVSEHYQCCRKIFIQSSHNQLNENRWLEKTLKRAEKRRSELSFMIQVKILHTTKSPAV

SEQ ID NO: 54 - protein, 381 aa, Homo sapiens
  REGION 1..381: note = MISC_FEATURE - Human APOBEC3G D316R D317R polypeptide sequence
MKPHFRNTVERMYRDTFSYNFYNRPILSRRNTVWLCYEVKTKGPSRPPLDAKIFRGQVYSELKYHPEMRFFHWFSKWRKLHRDQEYEVTWYISWSPCTKCTRDMATFLAEDPKVTLTIFVARLYYFWDPDYQEALRSLCQKRDGPRATMKFNYDEFQHCWSKFVYSQRELFEPWNNLPKYYILLHFMLGEILRHSMDPPTFTFNFNNEPWVRGRHETYLCYEVERMHNDTWVLLNQRRGFLCNQAPHKHGFLEGRHAELCFLDVIPFWKLDLDQDYRVTCFTSWSPCFSCAQEMAKFISKKHVSLCIFTARIYRRQGRCQEGLRTLAEAGAKISFTYSEFKHCWDTFVDHQGCPFQPWDGLDEHSQDLSGRLRAILQNQEN

SEQ ID NO: 55 - protein, 182 aa, Homo sapiens
  REGION 1..182: note = MISC_FEATURE - Human APOBEC3G chain A polypeptide sequence
MDPPTFTFNFNNEPWWGRHETYLCYEVERMHNDTWVLLNQRRGFLCNQAPHKHGFLEGRHAELCFLDVIPFWKLDLDQDYRVTCFTSWSPCFSCAQEMAKFISKNKHVSLCIFTARIYDDQGRCQEGLRTLAEAGAKISFTYSEFKHCWDTFVDHQGCPFQPWDGLDEHSQDLSGRLRAILQ

SEQ ID NO: 56 - protein, 184 aa, Homo sapiens
  REGION 1..184: note = MISC_FEATURE - Human APOBEC3G chain A D120R D121R polypeptide sequence
MDPPTFTFNFNNEPWVRGRHETYLCYEVERMHNDTWVLLNQRRGFLCNQAPHKHGFLEGRHAELCFLDVIPFWKLDLDQDYRVTCFTSWSPCFSCAQEMAKFISKNKHVSLCIFTARIYRRQGRCQEGLRTLAEAGAKISFMTYSEFKHCWDTFVDHQGCPFQPWDGLDEHSQDLSGRLRAILQ

SEQ ID NO: 57 - protein, 367 aa, Homo sapiens
  REGION 1..367: note = MISC_FEATURE - hAPOBEC-4 polypeptide sequence
MEPIYEEYLANHGTIVKPYYWLSFSLDCSNCPYHIRTGEEARVSLTEFCQIFGFPYGTTFPQTKHLTFYELKTSSGSLVQKGHASSCTGNYIHPESMLFEMNGYLDSAIYNNDSIRHIILYSNNSPCNEANHCCISKMYNFLITYPGITLSIYFSQLYHTEMDFPASAWNREALRSLASLWPRVVLSPISGGIWHSVLHSFISGVSGSHVFQPILTGRALADRHNAYEINAITGVKPYFTDVLLQTKRNPNTKAQEALESYPLNNAFPGQFFQMPSGQLQPNLPPDLRAPVVFVLVPLRDLPPMHMGQNPNKPRNIVRHLNMPQMSFQETKDLGRLPTGRSVEIVEITEQFASSKEADEKKKKKGKK

SEQ ID NO: 58 - protein, 388 aa, Rattus norvegicus
  REGION 1..388: note = MISC_FEATURE - rAPOBEC-4 polypeptide sequence
MEPLYEEYLTHSGTIVKPYYWLSVSLNCTNCPYHIRTGEEARVPYTEFHQTFGFPWSTYPQTKHLTFYELRSSSGNLIQKGLASNCTGSHTHPESMLFERDGYLDSLIFHDSNIRHIILYSNNSPCDEANHCCISKMYNFLMNYPEVTLSVFFSQLYHTENQFPTSAWNREALRGLASLWPQVTLSAISGGIWQSILETFVSGISEGLTAVRPFTAGRTLTDRYNAYEINCITEVKPYFTDALHSWQKENQDQKVWAASENQPLHNTTPAQWQPDMSQDCRTPAVFMLVPYRDLPPIHVNPSPQKPRTVVRHLNTLQLSASKVKALRKSPSGRPVKKEEARKGSTRSQEANETNKSKWKKQTLFIKSNICHLLEREQKKIGILSSWSV

SEQ ID NO: 59 - protein, 363 aa, Macaca fascicularis
  REGION 1..363: note = MISC_FEATURE - mfAPOBEC-4 polypeptide sequence
MEPTYEEYLANHGTIVKPYYWLSFSLDCSNCPYHIRTGEEARVSLTEFCQIFGFPYGTTYPQTKHLTFYELKTSSGSLVQKGHASSCTGNYIHPESMLFEMNGYLDSAIYNNDSIRHIILYCNNSPCNEANHCCISKVYNFLITYPGITLSIYFSQLYHTEMDFPASAWNREALRSLASLWPRVVLSPISGGIWHSVLHSFVSGVSGSHVFQPILTGRALTDRYNAYEINAITGVKPFFTDVLLHTKRNPNTKAQMALESYPLNNAFPGQSFQMTSGIPPDLRAPVVFVLLPLRDLPPMHMGQDPNKPRNIIRHLNMPQMSFQETKDLERLPTRRSVETVEITERFASSKQAEEKTKKKKGKK

SEQ ID NO: 60 - protein, 218 aa, Rattus norvegicus
  REGION 1..218: note = MISC_FEATURE - rAPOBEC-1 (delta 177-186) polypeptide sequence
MSSETGPVAVDPTLRRRIEPHEFEVFFDPRELRKETCLLYEINWGGRHSIWRHTSQNTNKHVEVNFIEKFTTERYFCPNTRCSITWFLSWSPCGECSRAITEFLSRYPHVTLFIYIARLYHHADPRNRQGLRDLISSGVTIQIMTEQESGYCWRNFVNYSPSNEAHWPRYPHLWVRGLPPCLNILRRKQPQLTFFTIALQSCHYQRLPPHILWATGLK

SEQ ID NO: 61 - protein, 218 aa, Rattus norvegicus
  REGION 1..218: note = MISC_FEATURE - rAPOBEC-1 (delta 202-213) polypeptide sequence
MSSETGPVAVDPTLRRRIEPHEFEVFFDPRELRKETCLLYEINWGGRHSIWRHTSQNTNKHVEVNFIEKFTTERYFCPNTRCSITWFLSWSPCGECSRAITEFLSRYPHVTLFIYIARLYHHADPRNRQGLRDLISSGVTIQIMTEQESGYCWRNFVNYSPSNEAHWPRYPHLWVRLYVLELYCIILGLPPCLNILRRKQPQHYQRLPPHILWATGLK

SEQ ID NO: 62 - protein, 198 aa, Mus musculus
  REGION 1..198: note = MISC_FEATURE - mouse cytidine deaminase polypeptide sequence
  REGION 1..30: note = MISC_FEATURE - Nuclear localization sequence
  REGION 183..198: note = MISC_FEATURE - Nuclear export signal
MDSLLMKQKKFLYHFKNVRWAKGRHETYLCYVVKRRDSATSCSLDFGHLRNKSGCHVELLFLRYISDWDLDPGRCYRVTWFTSWSPCYDCARHVAEFLRWNPNLSLRIFTARLYFCEDRKAEPEGLRRLHRAGVQIGIMTFKDYFYCWNTFVENRERTFKAWEGLHENSVRLTRQLRRILLPLYEVDDLRDAFRMLGF

SEQ ID NO: 63 - protein, 224 aa, Petromyzon marinus
  REGION 1..224: note = MISC_FEATURE - pmCDA-1 polypeptide sequence
MAGYECVRVSEKLDFDTFEFQFENLHYATERHRTYVIFDVKPQSAGGRSRRLWGYIINNPNVCHAELILMSMIDRHLESNPGVYAMTWYMSWSPCANCSSKLNPWLKNLLEEQGHTLTMHFSRIYDRDREGDHRGLRGLKHVSNSFRMGVVGRAEVKECLAEYVEASRRTLTWLDTTESMAAKMRRKLFCILVRCAGMRESGIPLHLFTLQTPLLSGRVVWWRV

SEQ ID NO: 64 - protein, 331 aa, Petromyzon marinus
  REGION 1..331: note = MISC_FEATURE - pmCDA-2 polypeptide sequence
MELREVVDCALASCVRHEPLSRVAFLRCFAAPSQKPRGTVILFYVEGAGRGVTGGHAVNYNKQGTSIHAEVLLLSAVRAALLRRRRCEDGEEATRGCTLHCYSTYSPCRDCVEYIQEFGASTGVRVVIHCCRLYELDVNRRRSEAEGVLRSLSRLGRDFRLMGPRDAIALLLGGRLANTADGESGASGNAWVTETNVVEPLVDMTGFGDEDLHAQVQRNKQIREAYANYASAVSLMLGELHVDPDKFPFLAEFLAQTSVEPSGTPRETRGRPRGASSRGPEIGRQRPADFERALGAYGLFLHPRIVSREADREEIKRDLIVVMRKHNYQGP

SEQ ID NO: 65 - protein, 209 aa, Petromyzon marinus
  REGION 1..209: note = MISC_FEATURE - pmCDA-5 polypeptide sequence
MAGDENVRVSEKLDFDTFEFQFENLHYATERHRTYVIFDVKPQSAGGRSRRLWGYIINNPNVCHAELILMSMIDRHLESNPGVYAMTWYMSWSPCANCSSKLNPWLKNLLEEQGHTLMMHFSRIYDRDREGDHRGLRGLKHVSNSFRMGVVGRAEVKECLAEYVEASRRTLTWLDTTESMAAKMRRKLFCILVRCAGMRESGMPLHLFT

SEQ ID NO: 66 - protein, 158 aa, Saccharomyces cerevisiae
  REGION 1..158: note = MISC_FEATURE - yCD polypeptide sequence
MVTGGMASKWDQKGMDIAYEEAALGYKEGGVPIGGCLINNKDGSVLGRGHNMRFQKGSATLHGEISTLENCGRLEGKVYKDTTLYTTLSPCDMCTGAIIMYGIPRCVVGENVNFKSKGEKYLQTRGHEVVVVDDERCKKIMKQFIDERPQDWFEDIGE

SEQ ID NO: 67 - protein, 194 aa, synthetic construct
  REGION 1..194: note = cytidine deaminase polypeptide sequence
MKPQIRDHRPNPMEAMYPHIFYFHFENLEKAYGRNETWLCFTVEIIKQYLPVPWKKGVFRNQVDPETHCHAEKCFLSWFCNNTLSPKKNYQVTWYTSWSPCPECAGEVAEFLAEHSNVKLTIYTARLYYFWDTDYQEGLRSLSEEGASVEIMDYEDFQYCWENFVYDDGEPFKRWKGLKYNFQSLTRRLREILQ

SEQ ID NO: 68 - protein, 192 aa, synthetic construct
  REGION 1..192: note = cytidine deaminase polypeptide sequence
MADSSEKMRGQYISRDTFEKNYKPIDGTKEAHLLCEIKWGKYGKPWLHWCQNQRMNIHAEDYFMNNIFKAKKHPVHCYVTWYLSWSPCADCASKIVKFLEERPYLKLTIYVAQLYYHTEEENRKGLRLLRSKKVIIRVMDISDYNYCWKVFVSNQNGNEDYWPLQFDPWVKENYSRLLDIFWESKCRSPNPW

SEQ ID NO: 69 - protein, 280 aa, synthetic construct
  REGION 1..280: note = cytidine deaminase polypeptide sequence
MDPQRLRQWPGPGPASRGGYGQRPRIRNPEEWFHELSPRTFSFHFRNLRFASGRNRSYICCQVEGKNCFFQGIFQNQVPPDPPCHAELCFLSWFQSWGLSPDEHYYVTWFISWSPCCECAAKVAQFLEENRNVSLSLSAARLYYFWKSESREGLRRLSDLGAQVGIMSFQDFQHCWNNFVHNLGMPFQPWKKLHKNYQRLVTELKQILREEPATYGSPQAQGKVRIGSTAAGLRHSHSHTRSEAHLRPNHSSRQHRILNPPREARARTCVLVDASWICYR

SEQ ID NO: 70 - protein, 555 aa, synthetic construct
  REGION 1..555: note = pYY-BEM3.1; tr|F7B644|F7B644_HORSE polypeptide sequence
MPRGRARERQRRNPMEKLDAEAFSFHFLNMEFVYDRNCSYLCYQVEGRLSGSPVLSEQGVFPNEVCGKTRRHAELCFLDWFRGRLSPDEYYCVTWFISWSPCSNCAREVAEFLKRHRNVELSIFAARLYYCRDHEQGLQSLCNRGAQLAVMLRKDFTYCWDNFVHNSGREFSPWENIDANSDLLARKLEDLLKNPMEKLHRKTFSFHFRNLKFAKGRKCSYLCYRVEGRLSGSPGLSEQGVFLNEVCDENCRHAELCFLHWFRGRLSPHADYRVTWFISWSPCSNCAREVAEFLKQHRNVELHISAARLYYWQRNKPGLRNLRSSGAQLAIMFFWDFRDCWDNFVHNSGRHFIPWKKINVNSRLLATKLEDLLKNPLEKLHPNTFSFHFCNLEFAYDRKYSYLCYQVEGRLSGSPGLSEQGVFLNEVCGKTRCHAELCFLDWFRVRLSPDEYYRVTWFISWSPCFYCAREVADFLKQYRNVKLSIFAARLYYCRDHAQGLRSLCSSGAQLAIMFFWDFRYCWDNFVHNSGREFRPWKKINVNSRLLATKLEDILK

SEQ ID NO: 71 - protein, 437 aa, synthetic construct
  REGION 1..437: note = pYY-BEM3.2; tr|D1LZA1|D1LZA1_PANTI polypeptide sequence
MEPWRPSPRNPMDRIDPKTFRFQFPNLRYASGRKLCYLCFQVERDYFYYNDSDWGVFRNEVHPWAPCHAEQCFLSWFRDQYPYRDEDYNVTWFLSWSPCPTCAEEVVEFLEEYRNLTLSIFTSRLYYFWHPNYQEGLCKLWDAGVQLDIMSCDEFEYCWDNFVYHKGMRFQRRNLLKDYDFLAAKLQEILSPGQQRKRDWPFPPRPGAQVDPRSWVQEVTEPGINTRRHPLHLLVSFLLPRPTMNPLQEDIFYRQFGNQHRVPKPYYYRRKTYLCYQLKLPEGTLIDKDCLRNKKKRHAEICFIDKIKSLTRDTSQRFEIICYITWSPCPFCAEELVAFVKDNPHLSLRIFASRLYVHWRWKYQQGLRHLHASGIPVAVMSLPEFEDCWRNFVDHQDRLFQPWRNLDQYSESIKRRLGKILTPLNDLRNDFRNLKLE

SEQ ID NO: 72 - protein, 440 aa, synthetic construct
  REGION 1..440: note = pYY-BEM3.3; tr|A0A3Q0DM17|A0A3Q0DM17_TARSY polypeptide sequence
MPMKRMYSNIYFDHFNNQRLLSGQNAPWLCFKVERVENCMLVPLETGVFGNQVSGCCGKTERPVEPTSLTRSVLVSPNPGTELRAQQPSRKGHLGKLGCVEYPSPGLALVMLGYGASTYCPDSSMYCPETCHHPEMCFLYWFEKTLSHEEQYQITWYVSWSPCVNCAEEVAEFLSVHPKVNLTIYAARLYCYQKLNHRQGLRRLCKEGACVKIMNYEEFDHCWENFVYNNYKSFKPWVKLQDNYELLATELDKILRIPMERMPQKKFRFHFQNLIAKDRNTTWLCFEVKNVRKKHPPDLLERGIFQNQVTPRINCHAEMCFLSWFLENMLLHGKRYQVTWYISWSPCSICAEEVAEFLSAHPKVSLTIYAARLYYFWVPGYRQGLRRLVEEGARVEIMNYEEFDYCWENFVSINNEPFQPWEGLHEKYGYLVTKLNNILG

SEQ ID NO: 73 - protein, 453 aa, synthetic construct
  REGION 1..453: note = pYY-BEM3.4; tr|A0A3Q0DNJ5|A0A3Q0DNJ5_TARSY polypeptide sequence
MEDNPEPRPRQQMDQDTFIFNFNNDPSVRGRHQTFLCYEVEHLDDDTWVPQDKYLGFLHNQPQSRSNAYCAYHAELCFLELVSSWQLDPAQRYRVTCFISWSPCSSCAQEVAAFLKKNRHVTLRILAARIYDYYQGYEDGLRTLQGVGVDITVMTSAEFGHCWNTFVDHQGSPFQPWEGLDQHSQVIWQRMQDILQVIPAKYLMEKVKYTVTVDILFKGRVPGPRYLMDQNTFTRNFINNLSVSGRRQTLLCYEVERLGGDIWVPLDQLRGFLLSQARDVLNYYQGRHAEPCFLDLVSSWQLDPAQHYRVTWFISWSPCTSCAQAVAAFLRENRHVTLRILAARIYDYHQGYEEGLRTLQRTGAHIDIMTFKEFGHCWNTFVNHKGSPFKSWTGLDQHSQALRKRLQDILHTMASSLWDQSEPKKPIPSQEVTLPESIPPSHGNRFRLVKRPS

SEQ ID NO: 74 - protein, 424 aa, synthetic construct
  REGION 1..424: note = pYY-BEM3.5; tr|G5AYU5|G5AYU5_HETGA polypeptide sequence
FCFLSCVHRKPIERIYKKAFRFYFRNLRCAYGRNKTFLCYEVKRERDNKVLHKGVVLNQVEPYMPLHAELRFLSWFHDTLLCPLGSYQVTLYVSWSPCSECAEELTTFLAGHRNVTMTIYVAQLYYCNWKSPNREGLKILIAEDARLRVMFYDEFLYCWRNFVKNDYNNFDPWSLLDENSRYHNRILQNILKGWGRPHRVGPEGEQTATPGGSGGHCISVFSLLRRREMTLKEETFRVQFNNAYKAPKPYRRRVTYLCYQLQEANGDPLTKGCLRTKKGYHAESRFIKRICSMDLGQDQSYQVTCFLTWSPCPHCAQELVSFKRAHPHLRLQIFTARLFFHWKRSYQEGLQRLCRAQVPVAVMGHPEFAYCWDNFVDHQPGPFEPPWAKLEYYSSCLKRRLQQILRSWGVDDLTNDFRNLQLGP

SEQ ID NO: 75 - protein, 385 aa, synthetic construct
  REGION 1..385: note = pYY-BEM3.6; tr|A0A2Y9QMV5|A0A2Y9QMV5_TRIMA polypeptide sequence
MLSSPQTPGTRKPMKTLAPDEFSFNFENLRLAHGRNTTFLCFQVETKAPPSLNSPDSGIFQNQDHCPSHHHAEMVFLTWFQKRLSPAQHYEVTWYMSWSPCSRCAVQVAKFLKSNSTVNLSIFVARLYYPRELETKDGLHSLWQAGAQVQIMFFQDFKYCWENFVNNEGKPFQPWKNLDENSKDWDTELKDIHRNTTDLLTEEMFYSQFYNREKKSSIPRKTYLCYQLNEPQPVKRCLHYKKGYHAVTRFIDGIVSMNLDPARSYDITCYFTWSPCNRYARKLVSFIEDYPNLRLKVYTSRLYFHWCWTNMQGLQHLQNSRVTVAVMTFRDFEYCWKNFVDNQGKPFEPWEKLDLYSQSTERRLRRILKPLTPDVLNEDFGNLHL

SEQ ID NO: 76 - protein, 381 aa, synthetic construct
  REGION 1..381: note = pYY-BEM3.7; tr|H0XHI0|H0XHI0_OTOGA polypeptide sequence
LSCAFRDPMNRMYPKTFCQNFEKEPCPSNQNSSWLCFEVETKNSAVFFHRGVFRNQPAPPPRAPTSVLLSQGPVKTPCHAEECFLTWIQGVLPPDHHYHVTWYVSRGPCANCANLIVHFLAMHRRVTLTIFAAHLNFFWESDFQQGLLRMDQEGVQLHIMGYEEFEYCWDNFVYNQRKQFVPWNGLNENYEFMVSTLEDILRSPLDRIRQKDFSIHFRNSLWLDDKSTWLCFEVKRTKSPVPLYRGVFRNQSPPKTPCHAEVRFFTWLQDLPPDFCCQFTWYLSWSPCADCADLVANFLAKHRNVSLTIFVARLYYYRDPEMHRGLRRMYQEGANVDIMSVIEFEYCWDNFVYNQGKQFVPWNGLNENYEFLVPRLQEILE

SEQ ID NO: 77 - protein, 337 aa, synthetic construct
  REGION 1..337: note = pYY-BEM3.8; tr|A0A3M0K4Y7|A0A3M0K4Y7_HIRRU polypeptide sequence
MYISKKALRRHFDPRVYPRETYLLCELQWEGSRRVWIHWIRNVPDHHAEEYFLEEVFEPRNYGFCNITLYLSWSPCCTCCSKIRDFLKRNPNVKIDIRVARLIYPDYAETRSSLRELNGLQRVSIQVMEAAGLSCIESKNHRISQVERDPKGSSSPTLFTLQDHLKLSNMTESVIQDSVSIQICYQMRILGFQCHIRWKLQPEDFQRNYSPNQIGRVVYLLYEVRWRRGSIWRNWCSNNPEQHAEVNFLENHFHHRPQTPCSITWFLSTSPCGKCSRRILEFLKSQPNVTLEIYAAKLFRHHDIRNRQGLRNLMMNGVTIYIMNLEGNPASLCLSVD

SEQ ID NO: 78 - protein, 237 aa, synthetic construct
  REGION 1..237: note = pYY-BEM3.9; tr|A0A3P4LUZ8|A0A3P4LUZ8_GULGU polypeptide sequence
MSFEDYEYCWETFVDHKGMYFQSWDLLRDNDLLAAELKNILRSTMNPLRQEIFYHQFGNQPRAPRPYHRRKTYLCYQLQPHEGPITARVCLQNKKKRHAEIRFIDNIRALRLDRSQTFEITCYLTWSPCPTCAKALAVFVQDHPHISLRLFASRLFIHWCWKYQEGLRLLHRSRIPVAVMRLQEFEDCWRNFVDNQDEPFQPWNKLEQYSESITRRLRRILGHPQNNLENDFRNLHI

SEQ ID NO: 79 - protein, 221 aa, synthetic construct
  REGION 1..221: note = pYY-BEM3.10; tr|G5BPM8|G5BPM8_HETGA polypeptide sequence
RRRIEPWQFEASFDPRQLRRETCLLSEVRWGTSPRAWRGCSLNTARHAEVSFMDRLTSEGRLRGPVRCSITWFLSWSPCGACAQAIGEFLRQHPNVSLVIYIARLFWHVDEQNRQGLRDLVTRGVRMQVMSDPEFAHCWRNFVNYSPGQEARWPQVPPVWTWLYSLELHCILLNLPPCLKISRRHHNQLTFFQLILQNCHYQAIPSPVLLASGLIHPFVTW

SEQ ID NO: 80 - protein, 211 aa, synthetic construct
  REGION 1..211: note = pYY-BEM3.11; tr|H2M862|H2M862_ORYLA polypeptide sequence
MITKLDSVLLPKKKFIYHYKNMRWARGRHETYLCFVVKRRVGPESLSFDFGHLRNRNGCHVELLFLRHLSALCPGLWGYGATGQGRVSYSITWFCSWSPCANCSFRLAQFLSQTPNLRLRIFVSRLYFCDLEDSREREGLRMLKKVGVHITVMSYKDYFYCWQTFVARKQSKFKPWDGLHQNSVRLSRKLNRILQPCETEDFRDAFKLLGL

SEQ ID NO: 81 - protein, 353 aa, synthetic construct
  REGION 1..353: note = pYY-BEM3.12; tr|H0Y0C6|H0Y0C6_OTOGA polypeptide sequence
MYLKTFYRHFNNRPYLSRRNDTWLCFEVKTTSSNSPGSFYSGVFRNQGPRYCPWHTELCFLTWVRPIVSHHHFYQITWYMSWSPCANCAWQVATFLATHENVSLTNYTVRIYYFWRQDYRQGLLRMIEEGTQVYVMSSKEFQHCWENFVDHWGTRWVTCWNRLKKNYEFLVTRLSEILSDPKERISPNTFYNQFNNTPVPRGRKDTWLCFEVKEKNSNSPGSFHRGVFQNQVFSGTSSHARRCPPDHHYEVTWYTSWSPCAHCAWHVVNFLTSNPNVSLTIFAARLYYIYRPEIQQGLRRVFQEGAKVHIMSLKEFKYCWAKLVYNSGMRFMPWYQFNFNFLFPNTTLKGDLH

SEQ ID NO: 82 - protein, 189 aa, synthetic construct
  REGION 1..189: note = pYY-BEM3.13; tr|A0A3Q2Z5X6|A0A3Q2Z5X6_HIPCM polypeptide sequence
MDVHFMNFIYHYKNMRWAKGRNETYLCFVVKRRVGPNSLTFDFGHLRNRNGCHVELLFLRYLGRRLSYSITWFCSWSPCANCSAALSQFLSRMPNLRLRIFVARLYFCDMEDSHEREGLRLLQKAGVQVTVMSYKDYYYCWQTFVDRKKSHFKAWEDLHQNSVRLSRKLNRILQPCEMDLRDAFKLLGL

SEQ ID NO: 83 - protein, 190 aa, synthetic construct
  REGION 1..190: note = pYY-BEM3.15; tr|A0A2K6NY90|A0A2K6NY90_RHIRO polypeptide sequence
MNPHIRNPMEAMYPGTFYFHFKNLWEADNRNESWLCFAVEVIKHHSTVSWKRGVFRNQVDPETHCHAEKCFLSWFCDNTLSPKKNYQVTWYTSWSPCPECAREVAKFLARHSNVMLTIYTARLYYSQYPNYQEGLRRLNEEGVPVEIMDYEDFKYCWENFVYNGDELFKPWKGLKYNFLFLDSKLQEILE

SEQ ID NO: 84 - protein, 202 aa, synthetic construct
  REGION 1..202: note = pYY-BEM3.16; tr|Q6ICH2|Q6ICH2_HUMAN polypeptide sequence
MNPQIRNPMERMYRDTFYDNFENEPILYGRSYTWLCYEVKIKRGRSNLLWDTGVFRGPVLPKRQSNHRQEVDPETHCHAERCFLSWFCDDILSPNTNYEVTWYTSWSPCPECAGEVAEFLARHSNVNLTIFTARLCYFWDTDYQEGLCSLSQEGASVKIMGYKDFVSCWKNFVYSDDEPFKPWKGLQTNFRLLKRRLREILQ

SEQ ID NO: 85 - protein, 202 aa, synthetic construct
  REGION 1..202: note = pYY-BEM3.17; tr|G8GPV1|G8GPV1_CERNE polypeptide sequence
MDGSPASRPGHVMDPGTFTSNFNNKPWVSGQRETYLCYKVERSHNDTWVLLNQHRGFLRNQAKNRLHGDYGCHAELCFLGEVPSWRLDPTQTYRVTWFISWSPCFSGGCAEQVRAFLQENTHVRLRIFAARIYDYDFLYQEALRTLRDAGAQVSIMTYEEFKHCWDTFVDHQGRPFQPWDGLDEHSQALSGRLQAILQNQGN

SEQ ID NO: 86 - protein, 181 aa, synthetic construct
  REGION 1..181: note = pYY-BEM3.18; tr|Q1WBT6|Q1WBT6_SYMSY polypeptide sequence
MALLTAKTFRLQFNNKRRVTKPYYPRKALLCYQLTPQNGSTPTRGYFKNKKKRHAEIRFINKIKSMGLDETQCYQVTCYLTWSPCPSCAWELVDFIKAHDHLNLGIFASRLYYHWCRHQQEGLRLLCGSQVPVEVMGFPEFADCWENFVDHEEPLSFNPSEMLEELDKNSRAIKRRLEKIK

SEQ ID NO: 87 - protein, 211 aa, synthetic construct
  REGION 1..211: note = pYY-BEM3.19; tr|A0A3B4CS14|A0A3B4CS14_PYGNA polypeptide sequence
MDNTNRRKFIYHYKNVRWARGRHETYLCFVVKKRNSPDSLSFDFGHLRNRNGCHVELLFLRYIEVLCPGLWGSGVDGVRVSYAVTWFCSWSPCSNCAQRLTNFLSQTPNLRLRIFVARLYFCDEEDSLEREGLRHLQRAGVQITVMTYKDFFYCWQTFVASRERCFKAWEGLRQNSVRLSRKLNRILQVFISTPVISPLITTHLGQSWAGG

SEQ ID NO: 88 - protein, 315 aa, synthetic construct
  REGION 1..315: note = pYY-BEM3.20; tr|A0A087XZI4|A0A087XZI4_POEFO polypeptide sequence
RKVSYSVTWFCSWSPCANCSIRLAQFLHQTPNLRLRIFVSRLYFCDLEDSREREGLRILKKAGVHITVMSYKDYFYCWQTFVAKSQSKFKPWDGLHQNYIRLSRKLNRILQPALDIKKFIYHYKNLRWARGRCETYLCFVVKKKLHLFMFVIVGRNRLFDLNVTMNNKSLYLIPLHLQLLFLRHLGALCPGLWGYGVTGERKVSYSVTWFCSWSPCANCSIRLAQFLHQTPNLRLRIFVSRLYFCDLEDSREREGLRILKKAGVHITVMSYKDYFYCWQTFVAKSQSKFKPWDGLHQNYIRLSRKLNRILQVQFF

SEQ ID NO: 89 - protein, 189 aa, synthetic construct
  REGION 1..189: note = pYY-BEM3.21; tr|A0A341AEK4|A0A341AEK4_9CETA polypeptide sequence
MASDRGPSAGDATSRRRIEPWEFEVSFDPRELCKETRLLYEIKWGRSQHVWRHSGKNTTNHVECNFIEKFTSERPFHRSVSCCITWFLSWSPCWECSKAIREFLNQHPRVTLFIYVARLFQHMDPQNRQGLRDLIHSGVTIQIMGPTEYDYCWRNFVNYPPGKEAHWPRYPPPLMKLYALELHCIILVP

SEQ ID NO: 90 - protein, 180 aa, synthetic construct
  REGION 1..180: note = pYY-BEM3.22; tr|E2D879|E2D879_MUSMI polypeptide sequence
RNLISRETFNFNFENLCYAKGRKNTFLCYEVTRKDCDSPVSLCHGVFKNKGSIHAEICFLYWFHDKVLKVLTPREEFKVTWYMSWSPCFECAEQVVRFLATHHNLNLTIFSSRLYNVSDPDTQQKLCRLVQEGAQVAVMDLSEFKKCWEKFVDNDGQQFRPWKRLRTNFRYQNSKLQEIL

SEQ ID NO: 91 - protein, 221 aa, synthetic construct
  REGION 1..221: note = pYY-BEM3.23; tr|A0A2K5RDN6|A0A2K5RDN6_CEBCA polypeptide sequence
MWEAQSPGLSREWGSVAISPEDPGPLHIGRFLSCAFRHPMNAMYPGIFNFHFRNLRKAYGRNETWLCFTVEGIMNRSTVSWKSGVFRNQVGSDPFCHAEMCFLSWFRHNMLSPKKDYEVTWYASWSPCPECAGQVAEFLARHGNVRLTIFTAHLYYFWNPSFRQGLRRLSQEGASVLIMGYEDFEYCWDNFVYNDGQPFKPWKRLQDNSLSLYITLQEILQ

SEQ ID NO: 92 - protein, 206 aa, synthetic construct
  REGION 1..206: note = pYY-BEM3.24; tr|A0A2K5RDN7|A0A2K5RDN7_CEBCA polypeptide sequence
MEASPASRPRPLMGPRTFTENFTNNPEVFGRHQTYLCYEVKCQGPDGTRDLMTEQRDFLCNQARNLLSGFDGRHAERCFLDRVPSWRLDPAQTYRVTCFISWSPCFSCAREVAEFLQENPHVNLRIFAARIYDCRPRYEEGLQMLQNAGAQVSIMTSEEFRHCWDTFVDHQGHPFQPWEGLDEHSQALSRRLQAILQGNRWMILSL

SEQ ID NO: 93 - protein, 184 aa, synthetic construct
  REGION 1..184: note = pYY-BEM3.25; tr|A0A1C9CJ69|A0A1C9CJ69_CERAL polypeptide sequence
NPMKAMDPHIFYFHFKNLRKAYGRNETWLCFAVEIIKQRSTVPWRTGVFRNQVDPESHCHAERCFLSWFCEDILSPNTDYRVTWYTSWSPCLDCAGEVAEFLARHSNVELAIFAARLYYFWDTHYQQGLRSLSEKGASVEIMGYEDFKYCRENFVCDDGKPFKPWKGLKTNFRFLKRRLQEILE

SEQ ID NO: 94 - protein, 197 aa, synthetic construct
  REGION 1..197: note = pYY-BEM3.26; tr|A0A2R2Z4D2|A0A2R2Z4D2_PTEAL polypeptide sequence
MHLQVWRKVTEAWREGYTLKPWSRNPMERLYHDYFYFHFYNLPTPKHRNGCYICYQVEGTKKHSRMPLLRGVFENQESLDMMLSPGEKYRVTWYISWSPCFACVDEVIKFLREHTNVELIIFAARLYHSDILQYRQGLRKLHDAGVHVAIMSYYEFKHCLNDFVFHQGRSFCPWNDLNKNSKNLSNTLEDILRNQED

SEQ ID NO: 95 - protein, 206 aa, synthetic construct
  REGION 1..206: note = pYY-BEM3.27; tr|B7T161|B7T161_SHEEP polypeptide sequence
MTEGWAGSGLPGRGDCVWTPQTRNTMNLLRETLFKQQFGNQPRVPPPYYRRKTYLCYQLKELDDLMLDKGCFRNKKQRHAEIRFIDKINSLNLNPSQSYKIICYITWSPCPNCASELVDFITRNDHLNLQIFASRLYFHWIKPFCRGLHQLQKAGISVAVMTHTEFEDCWEQFVDNQLRPFQPWDKLEQYSASIRRRLQRILTAPT

SEQ ID NO: 96 - protein, 205 aa, synthetic construct
  REGION 1..205: note = pYY-BEM3.28; tr|A0A2R2X2G4|A0A2R2X2G4_PTEAL polypeptide sequence
MAGLGQACEGCCGQMPEISYPMGRLDPKTFSFEFKNLPYAYGRKSSYLCFQVEREQHSSPVPSDWGVFKNQFCGTEPYHAELCFLNWFRAEKLSPYEHYDVTWFLSWSPCSTCAEEIAIFLSNHKNVRLNIFVSRIYYFWKPAFRQGLQELDHLGVQLDAMSFDEFKYCWENFVDNQGMPFRCWKKVHQNYKSVLRKLNEILRRR

SEQ ID NO: 97 - protein, 309 aa, synthetic construct
  REGION 1..309: note = pYY-BEM3.29; tr|G1Q1M4|G1Q1M4_MYOLU polypeptide sequence
YAELSFLDLFQSWNLDRGRQYRLTWYMSWSPYPDCAQKLVEFLGENSHVTLRIFAADIHSLCSGYEDGLRKLRDARAQLAIMTRDELQYCWVTFVDNQGQPFRPWPNLVEHIKTKKQELKDILGNPMRRMYPKTFNFNFQNLNSYGRKSTFLCFEVETWEDGSVLDYQNGVFQNQLDPGHAELCFIEWFHEKVLFPDEVRCPDAQYHVTWYISWSPCFECAEQVAGFLNEHENVDLSISAARLYLCEDEDEQGLQDLVAAGAKVAMMAPEDFEYCWDNFVYNRGWPFTYWKHVRRNYGRLQEKLDEILW

SEQ ID NO: 98 - protein, 216 aa, synthetic construct
  REGION 1..216: note = pYY-BEM3.30; tr|A0A1S3AN78|A0A1S3AN78_ERIEU polypeptide sequence
RRIEPWEFEDFFDPRQFRPETCLLYEVRWGSSRNAWRSTARNTTRHAEVNFLERFAAERHFDKPVSCSITWFLSWSPCWECSQAIGAFLSQHPQVTLAIHVTRLFHHEDEQNRQGLRDLLARGVTLQVMGDSEYAHCWRTFVNSPPGAEGHYPRYPSDFTRLYALELHCIILGLPPCLEILRRYQNQFTLFRLVPQNCHYQMIPHLNFFVVRHYFF

SEQ ID NO: 99 - protein, 201 aa, synthetic construct
  REGION 1..201: note = pYY-BEM3.32; tr|Q4VUI3|Q4VUI3_XENLA polypeptide sequence
MTMDSMLLKRNKFIYHYKNLRWARGRHETYLCYIVKRRYSSVSCALDFGYLRNRNGCHAEMLFLRYLSIWVGHDPHRNYRVTWFSSWSPCYDCAKRTLEFLKGHPNFSLRIFSARLYFCEERNAEPEGLRKLQKAGVRLSVMSYKDYFYCWNTFVETRESGFEAWDGLHENSVRLARKLRRILQPPYDMEDLREVFVLLGL

SEQ ID NO: 100 - protein, 191 aa, synthetic construct
  REGION 1..191: note = pYY-BEM3.33; tr|E2RL86|E2RL86_CANLF polypeptide sequence
MNPLQEETFYQQFSNQRVPKPTYQRRTYLCYQLKPHEGSVIAKVCLQNQEKRHAEICFIDDIKSRQLDPSQKFEITCYVTWSPCPTCAKKLIAFVNDHPHISLRLFASRLYFHWRQKYKRELRHLQKSGIPLAVMSYLEFKDCWEKFVDHKGRPFQPWNKLKQYSESIGRRLQRILQPLNNLENDFRNLRL

SEQ ID NO: 101 - protein, 226 aa, synthetic construct
  REGION 1..226: note = pYY-BEM3.34; tr|G1LWB0|G1LWB0_AILME polypeptide sequence
SSAAPASIHLLDEDTFTENFRNDDWPSRTYLCYKVEGPDQGSGVPLGQDKGILHNKPAQGPEPSRHAECYLLEQIQSWNLDPKLHYGVTCFLSWSPCAKCAQKMARFLQENSHVSLKLFASRLYTRERWDEDYKEGLRTLKRAGASIAIMTYREFEHCWKTFVLHDQEGSCFQPWPFLHKESQKFSEKLQAILQVGVLLLSLPPPLPSSPLSSPWPFPAPLRASTG

SEQ ID NO: 102 - protein, 238 aa, synthetic construct
  REGION 1..238: note = pYY-BEM3.35; tr|A0A1U7S7K7|A0A1U7S7K7_ALLSI polypeptide sequence
MGEHWQYAGSGEYIPQDQFEENFDPSVLLAETHLLSELTWGGRPYKHWYENTEHCHAEIHFLENFSSKNRSCTITWYLSWSPCAECSARIADFMQENTNVKLNIHVARLYLHDDEHTRQGLRYLMKMKRVTIQVMTIPDYTYCWNTFLEDDGEDESDDYGGYAGVHEDEDESDDDDYLPTHFAPWIMLYSLELSCILQGFAPCLKIIQGNHMSPTFQLHVQDQEQKRLLEPANPWGAD

SEQ ID NO: 103 - protein, 220 aa, synthetic construct
  REGION 1..220: note = pYY-BEM3.36; tr|A0A2R2X2J8|A0A2R2X2J8_PTEVA polypeptide sequence
MPRIGNMNLLSEKTFNYHFGNQLRVKKPQGRRRTYLCYKLKLPNETLVKGYFINKKKNHAEIRFINKIRSLNLDQTQSYKITCYITWSPCSYCAGKLVALVKSCPHLSLQIFTSRLYYHWLWKNQAGLRYLWKINISVLVMKEPEFADCWDNFVNHQSRRFKPWEKLTQYSNSTERRLLRILRINRTDLFLAQSSEQDPGLNDLVDAIKRLFLDAHRPRD

SEQ ID NO: 104 - protein, 198 aa, synthetic construct
  REGION 1..198: note = pYY-BEM3.37; tr|A0A151P6M4|A0A151P6M4_ALLMI polypeptide sequence
MAVEEEKGLLGTSQGWKIELKDFQENYMPSTWPKVTHLLYEIRWGKGSKVWRNWCSNTLTQHAEVNCLENAFGKLQFNPPVPCHITWFLSWSPCCQCCRRILQFLRAHSHITLVIKAAQLFKHMDERNRQGLRDLVQSGVHVQVMDLPDYRYCWRTFVSHPHEGEGDFWPWFFPLWITFYTLELQHILLQQHALSYNL

SEQ ID NO: 105 - protein, 158 aa, synthetic construct
  REGION 1..158: note = pYY-BEM3.38; tr|A0A2K6MNR2|A0A2K6MNR2_RHIBE polypeptide sequence
IWLCFTMEIIKQCSTVSWKRGVFRNQVDPETHCHAERCFLSWFWEDTLSPNTNYQVTWYTSWSPCLDCAGEVAEFLARHSNVKLAIFAARLYYFWDTDYQQGLRSLSEEGTSVEIMGYEDFKYCWENFVYNGDEPFKPWKGLKYNFLFLDSKLQEILE

SEQ ID NO: 106 - protein, 182 aa, synthetic construct
  REGION 1..182: note = pYY-BEM3.40; tr|F1CGT0|F1CGT0_ANOCA polypeptide sequence
KAAILLSNLFFRWQMEPEAFQRNFDPREFPECTLLLYEIHWDNNTSRNWCTNKPGLHAEENFLQIFNEKIDIKQDTPCSITWFLSWSPCYPCSQAIIKFLEAHPNVSLEIKAARLYMHQIDCNKEGLRNLGRNRVSIMNLPDYRHCWTTFVVPRGANEDYWPQDFLPAITNYSRELDSILQD

SEQ ID NO: 107 - protein, 230 aa, synthetic construct
  REGION 1..230: note = pYY-BEM3.41; tr|C7AGG3|C7AGG3_HORSE polypeptide sequence
MDPQAPTQRGGLGQAYQGGDYVQAPGNGNTQHLLSEDVFKKQFGNQRRVTKPYYRRKTYVCYQLKLLRGPTIAKGYFRNKKKRHAEIRFIDKINSLGLDQDQSYEITCYVTWSPCATCACKLIKFTRKFPNLSLRIFVSRLYYHWFRQNQQGLRQLWASSIPVVVMGYQEFADCWENFADNRGNPFQSWEKLTEYSKGIKRRLQKILEPLNLNGLEDAMGNLKLGSVDLG

SEQ ID NO: 108 - protein, 197 aa, synthetic construct
  REGION 1..197: note = pYY-BEM3.42; tr|A0A250YMK7|A0A250YMK7_CASCN polypeptide sequence
MSLLKEDIFLYQFNNQQQVQKPYFRRRTYLCYQLEQPNGSRPQWPAKGCLQNKKGHHAEIRFIKRIHSMGLEQDQDYQITCYITWSPCLACACALAELKNHFPRLTLRIFASRLYFHWIRKFQMGLQHLYKSGVLVAVMSLPEFTDCWEKFVNHRQVFFTPWDKLEEHSRSIQRRLRRILQSWDVDDLTDDFRNLRL

SEQ ID NO: 109 - protein, 189 aa, synthetic construct
  REGION 1..189: note = pYY-BEM3.43; tr|B7T160|B7T160_SHEEP polypeptide sequence
MPWISDHVARLDPETFYFQFHNLLYAYGRNCSYICYRVKTWKHRSPVSFDWGVFHNQVYAGTHCHSERRFLSWFCAKKLRPDECYHITWFMSWSPCMKCAELVAGFLGMYQNVTLSIFTARLYYFQKPQYRKGLLRLSDQGACVDIMSYQEFKYCWKKFVYSQRRPFRPWKKLKRNYQLLAAELEDILG

SEQ ID NO: 110 - protein, 541 aa, synthetic construct
  REGION 1..541: note = pYY-BEM4.1; tr|A0A182D0J1|A0A182D0J1_BLAVI polypeptide sequence
MTNPESPPQAPCDFNEDALLNREPLRGSPIKFVSPVDYPDLVFALAGPVGVDIDYIQQSISDCLKSFDYSTEFIRITEIMQDIKCSKTIDCTDMLKEYQSKIEYANELRRAYRAKDLLAALTISAISKLREQIKERDEATNKSNIQPSRRKLAWVVRQLKTPEEVRLLRAVYGKQFVLVSIYSSPQRREDFLISKIKIKSRGTIDNNTSSEGAQRLIERDSKEDNEYGQNLSGTFCLGDIFVDSNNKESAIVSIDRFLNAFFGSNEISPTRDEYGMYLAKTASLRSCDLSRQVGAAIFSKTGEIISLGSNEVPKAGGGTYWTGDNADSRDIRLGHDPNEINKVEIFAEIISRLLEDKLLSNDLLNKDAASIVTILLSKNEGKRYKDLRVMDIIEFGRIIHAEMSAICDAARNGRAIIGATLFCTTFPCHLCAKHIVASGIGRIVYLEPYPKSYAKKLHSDSIQVEDHSDSEKVSFEPFIGISPSRYRELFEGGRRKDPFGEALKWKNDPRKPVIDVVVPPHFEAEKLVIAQLGKLIVSGTG

SEQ ID NO: 111 - protein, 330 aa, synthetic construct
  REGION 1..330: note = pYY-BEM4.2; tr|A0A2D6EXD2|A0A2D6EXD2_9ARCH polypeptide sequence
MIIGLVGTIGAGKQTIIDYLQEKYGYNALSCSDVLREILKKQGKPVTRDNLREIGNKTREEGGNGAIAKILLEKLRNNWKANYIVDSLRHPDEVSVLRTSPLFHLVAVDADLRIRFERVKARKREEEPTTLPAFVERDQKEMFGTGNEQRIRETMELADELVLNNGTVEELKQRIDDLNLVSDERLRPSWDDYFMRLARLAAQRSNCMSRKVGAIITKDRRVIATGYNGTPRGVKNCNEGGCERCNSAVAKGTAISECLCLHGEENAIIEAGRVRSEGATIYTSFLPCLWCTKMIIQAGLKEVVFSEVYDLHEASIKLFETSGVLIRRLK

SEQ ID NO: 112 - protein, 367 aa, synthetic construct
  REGION 1..367: note = pYY-BEM4.3; tr|F7YVM7|F7YVM7_9THEM polypeptide sequence
MNEFKYMSLALKLAKKGKYTTSPNPMVGAVIVKDGKILATGYHKKAGQPHAEINALSKLNFQAQNCEMYVTLEPCSHYGRTPPCADAIIRSGIRKVVIATLDPNPLVNGKGVEKLKNAGIEVVCGVLEEKAKKLNEKFFKYITTKIPFVALKIAQTLDGKIALKNGESKWITSEKSREYVHKLRMEYDAVLTGIGTILKDDPQLNVRLKKVYKQPLRIILDSKLKIPLSAKVLEDPSKVIILTTALADKEKLEELRSKGVEVIITNEKNGIVDLESALKILGEKKITSVMVEAGPTLLTSFLKESLFDKIYLFIAPKIFGADSKSVFSELGLEDISKSQKFSLESVKKIGEDLLLELYPKQLKKLEE

SEQ ID NO: 113 - protein, 449 aa, synthetic construct
  REGION 1..449: note = pYY-BEM4.4; tr|A0A3M6UNF1|A0A3M6UNF1_9CNID polypeptide sequence
MEEKSELENELMRSTSPKPSVPNGSKGNECEQRETRITKENLYMVLALWMEEFPVVEQTSSAKRLNKVGVVFVLPTDRVLAADCSRDGVHGVARVMVNHCGKLEGCKVFVSRKPCSLCAKLLVQSKVSRVFYLPIEPESENKGEIARADNLFKNSSVGQSVFVPCVEQKVLDKLEDKLPKEIITPDDISECRDNLLKKCGWSAEWFARAQASLPWPCFEGKMKSQVDNDFKSLIKWIAVVKAPMDKGVAFPKVKLTSDSRVVPDCDADNFPDSKTAYHMMIFAKMLARQTDDPKTGVGAVIVRGKVPDIVSLGWNGFPSKALYGEFPRASDDDRALQKKFPYVIHAEQNALMVRNVKDLTDGILFVTKPPCDECAPMIKLSGVKTIVIGEKIEKSRGGELSYNLIKEYIKEGIMTCYQMEATKTKAKRLASDPETRKRLKSSCSNSNDV

SEQ ID NO: 114 - protein, 414 aa, synthetic construct
  REGION 1..414: note = pYY-BEM4.5; tr|A0A2G3K826|A0A2G3K826_9BURK polypeptide sequence
MTKIIDDVNTAAAAVLDQATAAANQTTFAVGGVMVNNQTGEVISAIHNNVIIPLSNNVSFTFDPTAHGERQLVYWYYANKEALKLPEPNQITVITSLDPCAMCTGALLTAGFNVGVVAIDTYAGINCAQNFQFATLPANLRTKAQKNFGYYASGAANFKPLTRSYVGGPSVAFKNGVVTPANLRDCGTVFTQSVDTVRNTSNSTGLAPSQMSNPAELPSNSAILQAYRAIYKKAFTIKIDNPRLPDAQILTELKAVLADAPNARNAVAFIDPFGNLVLCMADAFNTSPVHAAFMNVTQEYAKTRWDLMNKYAQASTTDNPALYLTHPKYGTFVYLYAPDPDDSITIMSLGAYGSTMEGPIPNMFPSNLQFYYPPRNGAQFSELVPVVNELPPFYTQNVNISLMQVPGVTQAPTK

SEQ ID NO: 115 - protein, 308 aa, synthetic construct
  REGION 1..308: note = pYY-BEM4.6; tr|K1ZCJ4|K1ZCJ4_9BACT polypeptide sequence
MSSRAKKNRSTNLKKSIGQKSIENKPTDQKKDQVLVAYVPVIHEGYRRFFRHFPAVKELWLISQELSHELRSLQKDIRALKASETKKLLQTWGQFQKIKLLTPSSLAILQKTTTQLVFPDEEISHHLVEKYFAQNRVLFASFFLRWDKKSSLKKHDLQEYSEISNKEFDQMMIAIAQQEADKSDDWWRQVGGLIFKDETILLLAHNQHTPTEAEAYFAGDPRADFHQGEYLKISTAIHAEAYLIAQAAKQGISLEGADLYVTTFPCPVCAKQVAYSGIKRVFFREGYSLLDGETILKANGVKLIRVTV

SEQ ID NO: 116 - protein, 615 aa, synthetic construct
  REGION 1..615: note = pYY-BEM4.7; tr|A0A1G3PNQ8|A0A1G3PNQ8_9SPIR polypeptide sequence
MRDLPLLVLGLTGPMGAGCTRFARDISKMEPGKVIKKQGLLDQVAHEISELSKKASEIRLQCISNGKNSELAELKRLNRRLNAKLAERACLHVIAKSSLPEPLFISLNTIVIKIAVDSITAPEFAEWAKNHAKVADLLKWLRTQWESELTLYETWGQDAGRFSQDELEKMDAMFAEFERIGDEILKEDFETYFGKRNNDFSIRMFSENIRLSGNPFRPAENGGGGGKYDEPSMVMIARETDRYIRFYRTRSDQKRSHFFIIDEIKNPREAEYFRARHQNFFLVSIFSSSEIRASRMRRGLGHDAGVSDADFQHLFRELDSRDWGADDFDAHGLHRQNIYRCFNLADIAINNDVEDERFSEVLFNKFIRYYALMLSPGCVQPTPQETYMHLAYSLSLRSTCISRQVGAVITDLEDRILSLGWNEVPEGQIGCGLKVKKDYTDKENPLFEMEIWDNVITAEDLAVWDDEDSICVKDILSRIEIKTKLKSVSLTPEERADVLKALRIKRLEYSRSLHAEENAILQVASRGGVGLKDGTIYVTTFPCELCSKKIYQVGISKIYYTEPYPNSISEKVILKDGIRNIKILQFEGVKSYSYFKLFKPGFDKKDAQMLEGRGI

SEQ ID NO: 117 - protein, 291 aa, synthetic construct
  REGION 1..291: note = pYY-BEM4.8; tr|A0A1G0PGF4|A0A1G0PGF4_9BACT polypeptide sequence
MKHNNQLRKEIEKLLGQNSIIKNDELKKLQKEYKIETDELLISFLPYAAEFAKVPISKYKVGAVVLGKSGNIYFGSNMEFEAGALSATVHAEQSAVNNAWLNGETGINKIAVTAAPCGYCRQFLNELTTAKQLHVLLKDKNLEAAKVFKLTELLPEAFGPRDLEIEGGLMKVENHKLKIENINDELINAALEAANKSYAPYSKNYSGVSIQLSDGTIFSGRYSENAAYNPSLLPFQSALAFMNMNTKKGSNNKIVDAVLVEAVSNISQKDAAGTLLNSISKTKLRYYKIKN

SEQ ID NO: 118 - protein, 398 aa, synthetic construct
  REGION 1..398: note = pYY-BEM4.9; tr|A0A0P4WGY5|A0A0P4WGY5_9EUCA polypeptide sequence
MEENSSATSQPKCASRTKQGGNDLSTDMSNLSVGETKRTDFLPWDDYFMAVAFLSAMRSKDPSSQVGACIVNADKKIVGIGYNGMPIGCSDDELPWNKESLDPLQTKYMYVCHAEMNAIMNKNSSDLAGCCVYVALFPCNECAKLVIQAGIREVVFFSDKHQQKPETVASKKMLNMAGVAYRQYTPSQSKIELNLSLKEQEKSEPTADITQSSERDQNSKRKDYLSWEEYFMAMAHLSALRSKDPITQVGACIVNSKKKIVGIGYNGMPLGCNDDLMPWGNSSSNKLETKYMYVCHAGVNAIMNKNSCDVSGCTLYVALFPCNECAKVIIQAGIKTIIYASDTNKDQASILASKKMLDMAGIKYRADNLSQRKIVIDFKTIDWNSRFMNDHQNDPTCL

SEQ ID NO: 119 - protein, 259 aa, synthetic construct
  REGION 1..259: note = pYY-BEM4.10; tr|A0A3D8IG27|A0A3D8IG27_9HELI polypeptide sequence
MRKNILYFILTLFFLSGLYATSLPEDNVVSGVIYEKIDTVSAEVDHIYPMLALAIVYKDWQEKNMLNKQGHNIGLVIVDENNMPVFWVRNSVHATHNGTQHGEVRLVSNLLNCEGFNKYLDKYTLYTTLEPCIMCAGMLSMVQIPKVVYAQKDLSCGNTQEIISTAKYPRYYKAFTVENGYKKDLEECFEQYKICKNDSITDFLVNDSAKEIFRKASNDLQDYKVKFKENRRVIKVAQEFLQNIQTKDNLDVLQCPKNM

SEQ ID NO: 120 - protein, 256 aa, synthetic construct
  REGION 1..256: note = pYY-BEM4.11; tr|A0A351C8C4|A0A351C8C4_9BACT polypeptide sequence
MNELTKQSEHLRNEALRIATRSYVPYTGQQEGVIILLENGDLIPGVRVENASFQLTIPALQNALSTMYALQRTDISMIVSSIPFTDSDLAYTGGMAEIAWEMVGASLLLVAGAHIPEAGTFIDPARGENLLDVSREAALNAFIPESDFPVGSAIQTSDDVVIDGCNVEHSDWSKIICAERNVLSTARSYGLGQITTIYVSCPKEPGGTPCGACRQVIVELAPDATVWMDRGNQEPIAMKATKLLPGHFTGNVLKKQ

SEQ ID NO: 121 - protein, 301 aa, synthetic construct
  REGION 1..301: note = pYY-BEM4.12; tr|A0A1G6V2K7|A0A1G6V2K7_PEPNI polypeptide sequence
MPIVRVNEIGARLPEDWEALETAIWQAYVSREDLPDAGELDLTLVDDATIQELNKTHRQLDKSTDVLSFPMYDDRDDLAADVQAGLPVILGDIMISVPTAERQAQAYGHSFKREMAYLLVHGLLHIAGYDHMSAEEKSAMRRAEEAILADVDVPRDTAPSKTAAVLDEADVQALIDAARAARLQAYAPYSGYAVGAALLAADGRRFCGVNVENASYGATCCAERTALFAAVTAGARDFIALALVTEGDEPAPPCGLCRQALAEFSPDLAIYLAGPTGETYRRTSLAALFPEAFSLSTKESV

SEQ ID NO: 122 - protein, 528 aa, synthetic construct
  REGION 1..528: note = pYY-BEM4.13; tr|F2NP91|F2NP91_MARHT polypeptide sequence
MPVMETHALEARFKEALARLCPEGRLLAAVSGGGDSVALLYLLKAAGRDTIVAHLDHALRPDSAADAAFVEKLAQRLGFPLETEHVDVRALAHRKRINLEAAAREVRYAFLARVARRWKARCILTAHTLDDNAETVLLQILRGAGRGLGIRPLQRRVARPLLEFSRAELRAYLEARGARWLEDPTNRSLELDRNYLRHAVLPRITARFPHALEALARFSQAQQADDWALEALSARHLIPDRRWPVPAYRALPLERAPEALRRRAIRGVLEALGVRPEARLVADVEAALGGRAQTLPGGVVVRRQRGTLFFIPPTVRFPKVQPPAGLEARPPRPGDYLVFPYGRKRLVDFLNERGVPRELKRRWPVGAVGAEVRWVYGLWPEPDEDRYMRRALVLARAAARQGEVPIGAVLVRDGAVLAEAANAVEASRDATAHAELLALRTALRRVGEKVLPGATLYVTLEPCPMCYGAILEARVARVVYGVENLKAGAFTVHGLEPRVALEAGRVEGECAKVLKDFFARLRPGRDGA

SEQ ID NO: 123 - protein, 226 aa, synthetic construct
  REGION 1..226: note = pYY-BEM4.14; tr|A0A316TX77|A0A316TX77_9BACT polypeptide sequence
MINGYTPYSGNQNTCYVKGESGTFYPGVRIENVSYPLTISSVQAAVCSCLANSDNPVEYYTGDHQPELLQVWADEYDMKPGGKLPDSPLKLFDPLVPSIPDIKKELDVLTEKSVTPNSGFPVSALLQTEKGYIRGVNIELSSWALGLCAERVAISRALTAGYTQFKSIHIYAPEADFVSPCGACRQVLLEVMPDADTELYHGDGTLSKHIVSDLLPFGFTSHKLKK

SEQ ID NO: 124 - protein, 321 aa, synthetic construct
  REGION 1..321: note = pYY-BEM4.15; tr|R6VYG3|R6VYG3_9FIRM polypeptide sequence
MIHKGTQTIETKRLILRAFTPDDAEAAFENWMSDPKVTEFLRWKTHADISDSRKIVNEWANGSADPEFYQWAIVPKDVNEPIGTISVVDRNDALGIFHIGYCIGSKWWHKGITSEAFSAVIHFLFEEVGANRIESQHDPENIHSGDVMKKCGLTFEGTLRQADFNNRGIVDACVYSILQSEWQNNTSVWQRLYNAALTVQNDRVVSPFIDAGGVAAALMTKKGNIYTGICIDTASTLGMCAERNAVANMLTNGESRIDKIVAVMPDGKVGAPCGACREYMMQLDRDSGDIEILLDLETEKTVRLKDLIPDWWGAERFGDTE

SEQ ID NO: 125 - protein, 229 aa, synthetic construct
  REGION 1..229: note = pYY-BEM4.16; tr|A0A3C1HZ18|A0A3C1HZ18_9BACI polypeptide sequence
MGDIMENWNELSEPWKRCFLQAWKAYCHGSIPIGAVLVDSEGEIFLEGRNRVHELTAPEGQLCDCRIAHAEMNVLVQVKTSDYEKLSGATIYSTMEPCIQCFGAIILSRIKNISFAAIDDKLAGATTLEDRHGFIKSRNLNIAGPFSHLGEIQIILRTDFLLRIFDSEYADPLIAAHEKDYPIGVALGRHYHRNNRLQVAKKETIPFGELFNEFSFDIKRAREGYTLGK

SEQ ID NO: 126 - protein, 205 aa, synthetic construct
  REGION 1..205: note = pYY-BEM4.17; tr|A0A1M6KV24|A0A1M6KV24_9BACT polypeptide sequence
MEASQQNILLKIEGKGPVAEINFTVTLPEWLVEQVQSGSTVFLTQKEKMRFVLELARKNVAQETGGPFAAAVFSLESGELVSAGVNVVVESRCSSAHAEVVALSLAQKAVDSHDLGAAGLPRMVLVSSAEPCAMCMGAIPWSGVKQVICGARDEDVRSVGFDEGAKPLEWVEDFAERGIEVIRDVLREEATEVLWDYRERGGEIY

SEQ ID NO: 127 - protein, 207 aa, synthetic construct
  REGION 1..207: note = pYY-BEM4.18; tr|A0A2U0T9B4|A0A2U0T9B4_9RHIZ polypeptide sequence
METAELISRLLDVIEKDIAPVTAKGVARGNKLFGAAILKKSDLAVIVAETNNEIENPLWHGEMQAIKRFFELPADQRPATRDCLFLATHEPCSLCLSGITWSGFDNFYYLFSHQDSRDGFAIPYDIQILKSVYAVPEPETGTVSPARDLYNRSNDFWTSHGLQDMIAGLARSNREALLARIDDLNALYAELSERYQRDKGGKGIPLP

SEQ ID NO: 128 - protein, 231 aa, synthetic construct
  REGION 1..231: note = pYY-BEM4.19; tr|A0A2K9PN08|A0A2K9PN08_9FLAO polypeptide sequence
MSDKKESKIKISKTSESIELDEIHSLLSYSIVQKFWENDDRNGRGYNVGVILVDENKNIVDWDINSVNKTENSTQHGEMRLISRYLDKDELYSLKGYTMYPTLEPCAMCAGMMTMTNVYRTVNGQMDYFYSKALERLSIDTRECGGYPPYPRTVISEISPSSISTRLDAEYKQYTNAGNKPIITKFLSTYKAKTIYDDAFNQFINFKCKFPENKTKYENAIKFYNSLPESI

SEQ ID NO: 129 - protein, 330 aa, synthetic construct
  REGION 1..330: note = pYY-BEM4.20; tr|F4PWM7|F4PWM7_CAVFA polypeptide sequence
MRFSLSLLFVILSVLLAGVLACKDPYNPETVDYGQCASATKANYEVRSDSKVLTPADLPADELAVHESRMRHIIDIARVNNKKFVSSIYFPNGTLACIGINTGKPNMIAHGEIVAIQNCTEIHGISMYTNYSIYTTGEPCSMCASAILWSRFKTVVWSTYNSDLYCKICMSNIPIDSSYIFSRAYGLGIEAPVAIGGVVKAEGDAWFGTYCNRPTSIYYIAPKCACQDPAKVSPLKFTQTRTTVWVEGGDKVVTQWNAIISNPSNSTIVDPPIVISPSVVFKGAPWGISAASEPNTYKLSYNKVLFPGQTFSFGYSVYGLEEVAFTALEA

SEQ ID NO: 130 - protein, 193 aa, synthetic construct
  REGION 1..193: note = pYY-BEM4.21; tr|U7QZM1|U7QZM1_PHOTE polypeptide sequence
MNKTRRKLLATLGIMSISMSFIAQAGEKKTQVINNILSKQEITEHEKYMREAIKEAIKNPKHPFGAVIVNRNNGEILSRGVNTGRNNPILHGEIQAINHYITQYGNQGWENVALYTTGEPCSMCMSALVWIGIREVIWATSISVIRNSGIRQIDISAHEIAERASSFYNPITLVGGILANETDKLFLERKRGN

SEQ ID NO: 131 - protein, 319 aa, synthetic construct
  REGION 1..319: note = pYY-BEM4.22; tr|A0A081CH48|A0A081CH48_PSEA2 polypeptide sequence
MASRRHLLATQVTGNHRKLSLWHLRGWLSPYTKLVDAVYFLTTNSFYHSLQTPPVQSITMLLSSIITSLALAAQASAYREGLHPEFQSGLSINSVPATDRDHWMRLANSAIYYPPVSHPCPQAPFGTAIVNTTSNELICAIANRVGSTGDPTQHGEITAIQHCTNVMRKKGLSPQEIIAAWKQLSLYTNAEPCTMCLSAIRWAGFKEVIYGTSVGTISENGRNQIYIPSNLVLEKSYSFGHATLMLGNILTHETDPFFQHQFNESAPCPVGCERTQVGEARVKTCEPVPNWQKLVRLEYSEDSRVGSEPVAHTPLHLEL

SEQ ID NO: 132 - protein, 203 aa, synthetic construct
  REGION 1..203: note = pYY-BEM4.23; tr|A0A3D3HMU1|A0A3D3HMU1_9GAMM polypeptide sequence
MDYSDAILGAITSIRRNSKQPGVNVTDNVTDSSTQYNNDEYWMRRALALAREAGEAGEIPVGAVLVKDNQQVAGGFNQPIRSHDPAAHAEILTLREAGAVLGNYRLIDTTLYVTLEPCMMCAGALVHSRIKRLVFGAAEPKTGAAGSFIDLLTLPRLNHYMEVTGGVLGEECSVLLSDFFRRRRAEKKALKRQNSESGSDSAS

SEQ ID NO: 133 - protein, 270 aa, synthetic construct
  REGION 1..270: note = pYY-BEM4.24; tr|A0A1N5WT13|A0A1N5WT13_9ACTN polypeptide sequence
MLEKIERRLVAAAEAVVRSPSTGDAHTVAAAAMDANGDIYSGVNVFHFTGGPCAELVVIGSAAAANAPPLITIVAVGDGDRGVIAPCGRCRQVMLDLHPDVFVIVPTGDGQLAAKPVRELLPFGYVARTGSTAPRVVYFHPRHYDTISSGLKTATVRFQDSVQTGPAVFVFDDGESIRRLDAVVEKVESRRLDHLTEEDAHHEALPDSDALRDAIKTQYPMLGDGDVVDVATFRLTAISAPDPDPRSSYPPAVSRCNPAGPRADLLVGQS

SEQ ID NO: 134 - protein, 257 aa, synthetic construct
  REGION 1..257: note = pYY-BEM4.25; tr|X0SAC5|X0SAC5_9ZZZZ polypeptide sequence
MTKDGRVIASAHDTEVTDQDSTAHAEINAIRKASKIYRKDLTGCLIISTHEPCPMCTGSIIWSNISKVVYGVSIRDSIKAGRDMINLSCKEIIKKPNAEINIYDGILKKECLKLYNNDTRKLVKKFRKYEWINIEENLLNKRMQWFENNKTMIRKLKGNDLEKAYHLILMKIGIKRSEAPIVKKSESKIIFHSKNYCPSLEACIILDLDTREVCKEIYERPTEELIRRLNSKLRFTRNYDCIRPYSDYCEEIIILEK

SEQ ID NO: 135 - protein, 154 aa, synthetic construct
  REGION 1..154: note = pYY-BEM4.26; tr|A0A3B8IC10|A0A3B8IC10_9BACT polypeptide sequence
MPSHEDFIHQCLELGKEALLQGNPPVGSVIVWQDQVIGRGIENGRSSGDITQHAELLALQEAVATGQRDKLKEAIIYSTHEPCVMCAYPIRQYKIPTVVYSVAVPELGGHTSSWHLLTTEDVPKWGKAPKIITGISAEEVEALNAAFQDSLKKG

SEQ ID NO: 136 - protein, 180 aa, synthetic construct
  REGION 1..180: note = pYY-BEM4.27; tr|A0A2N9P8B9|A0A2N9P8B9_9FLAO polypeptide sequence
MFIFKLISPPVSIEVYQDKIIQKLYICFMENIFTDEYFMKKALQEAETAFQQGEIPVGAVIVIDNRIIARSHNLTEMLNDVTAHAEMQAITASANFLGGKYLKDCTLYVTLEPCQMCAGALYWSQISKIVYGATDEQRGYRAMGAQLHPKTKVISGIMQNECTHLMKDFFKQRRSKSTKD

SEQ ID NO: 137 - protein, 178 aa, synthetic construct
  REGION 1..178: note = pYY-BEM4.28; tr|K1KX30|K1KX30_9BACT polypeptide sequence
MVKNPVNNNELYFGKHSEIPMNEEQKAYMKMAVDLSRSGMESGKGGPFGCVIVKDGKVIGIGSNSVLETNDPTAHAEIVAIRDACRNLGHFQLDGCEVYTSCEPCPMCLGAIYWARPSKVFFANDKRDAAEAGFDDDFIYQELELPYEKRKIPFEQGMQDTAKEVFQEWILKEDKTLY

SEQ ID NO: 138 - protein, 196 aa, synthetic construct
  REGION 1..196: note = pYY-BEM4.29; tr|R4XI84|R4XI84_TAPDE polypeptide sequence
MSSEIEPPSTDVHKHAVAEAADESGAADAFMQIALQQAETALLNKEVPVGCVFVHQPTGTVLATGANQTNASLNGTLHAEFVAIESILRDHPPSIFRESDLYVTVEPCVMCASALRQLQVRKVYFGCGNDRFGGCGSVFSIHSDASKTGDAAYMVESGIFRKEAIMLLRRFYLLQNESAPKPALKSTRVLKEHFDE

SEQ ID NO: 139 - protein, 212 aa, synthetic construct
  REGION 1..212: note = pYY-BEM4.30; tr|A0A239CVF7|A0A239CVF7_9DELT polypeptide sequence
MSPASKKHFPSLFSFLLLTIGLICGTAHAQPQGHTADDTAATLANASLKEHEPFIRRCYQLAIDAGKKGNHPFGALLVHKGKIVLEAENTVLTDNDFTNHAEMNLIAEAARTLSRQIIPEATVYTSCAPCAMCTATLAMAGFTRIVYGVSHDALNKRFGLKGKSVSCPALFKTMGMELEFVGPVLEKEGLRVFDFWPEKDPHAQMLKKQARK

SEQ ID NO: 140 - protein, 320 aa, synthetic construct
  REGION 1..320: note = pYY-BEM4.31; tr|A0A1Q3NME1|A0A1Q3NME1_9BACT polypeptide sequence
MTEFNYDWAKLAFSSKRPLTNLKATFIIAPREISEKRFTQLLKEYLPKGDILLGISKEDYVEGLEGQPQFAMLQQKTLQKLIDKVNDASAHKVYTLRYFQRELPAIIEKLTPPRVVGIHGSWHHSFHTLPIYYLLSEKRIPYQLVAAFSDEDEARAYEVATDKKIVRPTLEGSFDDTTVLQLTDEVAKSSYDYGFQTGAILAEKVNGVYQPVAAGFNKVVPYQTYALLNGASRETNFSPANDMNHYDTIHAEMQILVEAAKQGISLKDKTLFVNLMPCPSCARTLSQTELSEIVYRIDHSGGYAVDLLTKVGKDIRRIVY

SEQ ID NO: 141 - protein, 180 aa, synthetic construct
  REGION 1..180: note = pYY-BEM4.32; tr|A0A2G6N4N7|A0A2G6N4N7_9DELT polypeptide sequence
MKERTVSYSDRHFMAEALEMAESALTQGEFPVGCVIADGTAVVARGHRTGTTAGAVNEIDHAEINALRHLGLAGEHLDRTDLTIYSTMEPCLMCFAAIVLSGINRIVYAYEDVMGGGTGCDLTGLPPLYRDAPLTLVAGVRRRASLNLFRRFFTDPENGYWAGSLLSRYTLNQTKDSHRL

SEQ ID NO: 142 - protein, 156 aa, synthetic construct
  REGION 1..156: note = pYY-BEM4.33; tr|A0A0G0RBB8|A0A0G0RBB8_9BACT polypeptide sequence
MQSVQYNKLTHLQRRALDEAEQVLENSYNPYSHFYVGACLISEDEQLIAGTNFENAAYGSAICAERAAVLRANAMSIRRFRGIAIIARGEDFNTTEVTGPCGSCRQVLYEISQVSGCDLQVILATSKKDKIVITTIRELLPLAFGPLDLGVDIGKY

SEQ ID NO: 143 - protein, 217 aa, synthetic construct
  REGION 1..217: note = pYY-BEM4.34; tr|A0A327L2Q5|A0A327L2Q5_9RHIZ polypeptide sequence
MVTSRDGEDEAMMARCVALSRIAVGKGEYPFGAVVAREGRIVAEAINRTIRDGDVSRHAEVIALARAQKAIGRRELRECSLYSNVEPCAMCSYCIREAWVGRVVYALGSPVMGGVSKWNILRDDGLSGRMPQVFDAAPEVVSGVLVEQAQAAWRDWSPLAWEMITLRGLMTDPSARPECRTRAARPRSLWHHLVALIERPPRPYVDPTSAAEGHADL

SEQ ID NO: 144 - protein, 162 aa, synthetic construct
  REGION 1..162: note = pYY-BEM4.35; tr|S2DR30|S2DR30_9BACT polypeptide sequence
MKMKKKIEITVSLEVIQKSEWSKEDRSLIERAIHAVEHAHAPYSNFMVGTALLLDNGQIFSANNQENVSFPVGICAERAVLSYAMGNFPNNRPVKLAVVAKRRSDSTWATVTPCGLCRQTINEYEVKFGHPIEILMLNPGEEILKASGIDQLLPFRFNDLNS

SEQ ID NO: 145 - protein, 153 aa, synthetic construct
  REGION 1..153: note = pYY-BEM4.36; tr|A0A369QGF1|A0A369QGF1_9BACT polypeptide sequence
MEEHEKWMHWCLNLAQQALQQGDFPVGAVVVQKGKLIGQGVEAGQLKKDITCHAEMEAIRDARQTINTADLQNCILYSTHEPCIMCSYVIRHHKISRVVVGTTVPEVGGSSSAYPLLSAPDISIWVAPPHLVTGVLAEACQALSQAYKQKFKK

SEQ ID NO: 146 - protein, 159 aa, synthetic construct
  REGION 1..159: note = pYY-BEM4.37; tr|A0A1W6X4U4|A0A1W6X4U4_9RHIZ polypeptide sequence
MTNPSRQERWDRRFLELAKVFGTWSKDRSAGTGCVIVGPDRLLRASGYNGFARGIDDEVPERHERPAKYSWTEHAERNAIYNAAKLGISLDGCTAYVNWFPCIDCARAIVQAGIVRLVGLHPDHADQRWGSEFKFATEMLRESGIEIILYDIPELAARK

SEQ ID NO: 147 - protein, 490 aa, synthetic construct
  REGION 1..490: note = pYY-BEM4.38; tr|A0A238BW09|A0A238BW09_9BILA polypeptide sequence
MEEMARKIRTKAKKANSYCNTMTFLISKASIVLLKAECKRIELTVVIFRFLIKMNASEPNNELCDMTVIKSMLKITHVIFDLDGLLIDTEVVFSKVNQCLLSKYNKKFTPHLRGLVTGMPKKAAVTYILEHEKLSAKVDVDEYCKKYDEMAEEMLPKCSLMPGVMKLVRHLKTHSIPMAICTGATKKEFEIKTRYHKELLDLISLRVLSGDDPAVKRGKPAPDPFLVTMDRFKQKPEKAENVLVFEDAANGVCAAIAAGMNVIMVPDLTYMKIPEGLQNKINSFSDNLIISNDLNVALMSLKKELSEEEVHFLNRAFEIAVDAVLNNEVPVGCVFVFEGQEVAFGRNDVNRTKNPTYHAEMVALKMMKQWCMDNGRDLEEIMRRTTLYVTLEPCIMCASALYHLRLKKILYGAANERFGGLVSVGTREKYGAKHFIEIMPNLSVDRAVKLLKEFYEKQNPFCPEEKRKVKKPKKSGNNNDNSDDAVALNV

SEQ ID NO: 148 - protein, 159 aa, synthetic construct
  REGION 1..159: note = pYY-BEM4.39; tr|A0A1J5H6Z0|A0A1J5H6Z0_9BACT polypeptide sequence
MAYQPSEKFMQMAIDKTREGVLSGQTPFGACIVKDGKVVACEHNTVWQDTDITSHGEVHTIRAACKAIGSIDLSGCILYSTCEPCPMCFSAIHWARIDTVVYGAFIADAQDAGFNELTISNEKMKEFGGSPVNFISGFMRDENVALFKLWKEQGANNVY

SEQ ID NO: 149 - protein, 168 aa, synthetic construct
  REGION 1..168: note = pYY-BEM4.40; tr|A0A3C2D945|A0A3C2D945_9BACT polypeptide sequence
MKTTEIRIIVHEYQNIDELTENDQYLLHEARRITEFAYAPYSGFHVGAAILLGNGMIVKGNNQENSAYPSGLCAERVALFYANANYPDSEVKTIAISAAKNGILVNDPIKPCGGCRQTLSEAEVRFGSPIRIILDGQDSILVLHGVESLLPLSFSKKDLASPLAATGR

SEQ ID NO: 150 - protein, 214 aa, synthetic construct
  REGION 1..214: note = pYY-BEM4.41; tr|A0A1I7EYS3|A0A1I7EYS3_9BURK polypeptide sequence
MKFKLDPSRPPDEDDYYLGVALAVRRKANCTGNRVAAVIVKNKRVIATGYNGVPEDMPNCLDGGCLRCSNPGGQFKSGTRYDLCICVHAEQNALLTAARFGISVEGAHLYTTMQPCFGCAKEILQAKIEKVFYLHPWVPTDVDPVMDAAMKAEYAKIIGKLKVKKLDFDDPVATWAVTTMRQAALASDKNPDKKTPPKTAKKKVAKKKSRTSPR

SEQ ID NO: 151 - protein, 155 aa, synthetic construct
  REGION 1..155: note = pYY-BEM4.42; tr|H8GQX8|H8GQX8_METAL polypeptide sequence
MNHEHFMRRAIELARQAPQYPFGAVIVRRDDGQCVGQGFNRSDLNPTYHGEMVAINDCAVRHCAEDWRGFDLYTTAEPCAMCQGAIEWAGIGRVFYGTSIPYLQKLGWWQIDLRAAEVSARAVFRDTLIVGGILETECNALFAAARRGCFGTGSE

SEQ ID NO: 152 - protein, 156 aa, synthetic construct
  REGION 1..156: note = pYY-BEM4.43; tr|A0A0S8HZN3|A0A0S8HZN3_9CHLR polypeptide sequence
MDEHDIRFLRASFDVARNARKNGNHPFGALLVDEHGRIVMEAENTVITAKDCTGHAETNLMREASSKYDSDFLANCTIYTSTEPCPMCAGAIFWSNVRRVVYGLSEESLYEIAGRGSEEVLFLSCREIFERGKKLIEVIGPLLEDEAREVHMGFWR

SEQ ID NO: 153 - protein, 193 aa, synthetic construct
  REGION 1..193: note = pYY-BEM4.44; tr|E3SF31|E3SF31_9CAUD polypeptide sequence
MKPTTVLQIAYLVSQESKCCSWKVGAVIEKNGRIISTGYNGSPAGGVNCCEHAEEQGWLLNKPKPVLIPGHKSECVRFSQVDRFVLAKAHREAHSAWSKNNEIHAELNAILFAARMGSSIEGATMYVTLSPCPDCAKAISQSGIKKLVYCETYDKNIPGWDDILKNAGIEVFNVPKRSLDKLNWENINEFCGE

SEQ ID NO: 154 - protein, 330 aa, synthetic construct
  REGION 1..330: note = pYY-BEM4.45; tr|F8AAC6|F8AAC6_THEID polypeptide sequence
MIRAPWHEYFMLLAKIVALRSGCNSRPSGAVIVKNKRILATGYNGPMPGAWHCTDRGPGYCFRREKGIPDIDKYNFCRATHAEANAIAQAARFGISVEGASLYCTLAPCYVCLKLIASAGIKKVYYEHDYGSRDFERDQFWKEAIKEAGLEKFEQITVSQEVMEQLQEILPYPTSKRRLAPTEFLDEFEDGKKYGVPSIEVLFNKLNYLTRQALKDITFVIEKTTVTEEPEGISFYLSGKMVELSELINTVKKQINADQNFYFLAKHNAIEAKIEILREAENIRLKAFLNECPLESFKRIAESLDYILYQVSNSLSLPTRLELSVNLLRI

SEQ ID NO: 155 - protein, 158 aa, synthetic construct
  REGION 1..158: note = pYY-BEM4.46; tr|A0A2H4ZNK4|A0A2H4ZNK4_9EUKA polypeptide sequence
MKKQLSRKIQEEWMSRLLRNAYDAGTYGEVPIAAVILNESGQCIGWGRNCREKDQNPLGHAEIIALRQASYLKKSWRFNECTMLVTLEPCPMCAGALLQARINHIIYGASDYKRGGFGGVLDLSKNSSAHHKIEITRGVKSIQSCQLLETWFRRRRRV

SEQ ID NO: 156 - protein, 176 aa, synthetic construct
  REGION 1..176: note = pYY-BEM4.47; tr|A0A239N5N1|A0A239N5N1_9PSED polypeptide sequence
MEGRAGIIPFDEGGAAMGPAEEDSPMQHLAYMREALALARANVEAGGRPFGAVLVRDGEVIARAANGTHLDHDPTAHAELLALRAAGRALGSPRLDGCVVYASGHPCPMCLAAMHLSGVSAAYYAYSNADGEPYGLSTAAVYAQMAQPVEWQSLPLQALRPEDEEGLYGFWRERRP

SEQ ID NO: 157 - protein, 199 aa, synthetic construct
  REGION 1..199: note = pYY-BEM4.48; tr|A0A328VTR2|A0A328VTR2_9PSED polypeptide sequence
MHPEHLALLQQAPASTHADDTWARLCCEQALLAVEEGCYAVGALLVDGAGELLCSGRNQVFAPAYASAAHAEMRVLDQLEAEHAQVDRRSLTLYVSLEPCLMCYGRILLAGITRVRYLARDRDGGFALRHGRLPPAWANLASGLSVVQAKADPYWLDLAEHAIGRLQDRQTLRQRVIRAWRGQRTLTDEFSSTKRTHSG

SEQ ID NO: 158 - protein, 402 aa, synthetic construct
  REGION 1..402: note = pYY-BEM4.49; tr|A0A103YG48|A0A103YG48_CYNCS polypeptide sequence
YIRELHASSLRRDEHEIQNPKILVIVDRLSSPSLHVSLSLSLSLVIFPPFIPLNQTPTHMENAKVVEAKDGTIAVASAFSGHQEVVQDRDHKFLTRAVEEAYKGVECGDGGPFGAVVVHKDEVVASCHNMVLKHTDPTAHAEVTAIREACKKLNKIELSDCEIYASCEPCPMCFGAIHLSRIKRLIYGAKAEAAIAIGFDDFIADALRGTGFYQKAHLEIKQADGNGAMIAEQVFEKTKAKFAIDHKFLTRAVEEAYKGVECGDGRPFGALVVHKDEVVVSCHNMVLNYTDPTAHAEITAIREACKKLNRIELSDCEMYSSCEPCPMCFGAIQISRIKRLVYGAKAEASIASGIPIGDFISDALKGTGFHEKANFEIKQADGNGAMIAEQVFERTKAMFPKR

SEQ ID NO: 159 - protein, 195 aa, synthetic construct
  REGION 1..195: note = pYY-BEM4.50; tr|W5M1M8|W5M1M8_LEPOC polypeptide sequence
NSSTRESRVMAQMEINGGASPPKKPGKGQSAADQDMITGLINKALQAKEFAYCPYSNFRVGAALMTNDGRVFTGCNVENACYNLGVCAERTAILKAVSEGYESFRAIAVSSDLQDQFISPCGACRQVMREFGTGWDVFLTKVDGSYVRMTVDELLPMSFGPDDLKKKKVFSLQNGHEVSTQFYTHSPCEAGENNN

SEQ ID NO: 160 - protein, 134 aa, synthetic construct
  REGION 1..134: note = pYY-BEM4.51; tr|A0A3N5YPZ2|A0A3N5YPZ2_9ALTE polypeptide sequence
MSNSETEHIQALVDAAQAAQKQSYSPYSSFQVGAAIFADDGNTYSGCNIENVAYPLGQCAEATAIGMMIMQGAKRIEDIMIASPNDQVCPPCGGCRQKISEFGTAETKIHMVTRSGEVSTVTLGELLPLAFDSL

SEQ ID NO: 161 - protein, 162 aa, synthetic construct
  REGION 1..162: note = pYY-BEM4.52; tr|A0A2A9NC86|A0A2A9NC86_9AGAR polypeptide sequence
MTNSTLSNEDRTRLIQGAFQARKKTYSPYSNFPVGAALLTTDGRIIEGANIENASYGGTICAERTAIVKAVSDGYRHFAGIAVTTKMPTRVSPCGICRQVLREFCSLDMPVLLVPGDYPQRNPVDDDGADKPGVITEGGVRETTLGALLPDSFGPENLPPRA

SEQ ID NO: 162 - protein, 163 aa, synthetic construct
  REGION 1..163: note = pYY-BEM4.53; tr|A0A2D6RD43|A0A2D6RD43_9GAMM polypeptide sequence
MNIENLITENDETLIRRCIELAGESVKNGDKPFGALLAKDGNIIFESSNNAKTKVPYHAEILTLMDAQDKLNTTDLSDYALYSNCEPCPMCSFMIREYKLDKVVFSVHSPYMGGQSRWNILEDDVLTRFKPYFSKPPNVVGGVLESEGKRIFDKVGLWMFGKE

SEQ ID NO: 163 - protein, 204 aa, synthetic construct
  REGION 1..204: note = pYY-BEM4.54; tr|A0A0H3AVL6|A0A0H3AVL6_BRUO2 polypeptide sequence
MHAKGYSQQERRIIPFANRFRFRELCSNKSLHGLRAKFPEQYTKWDPMRKAASITKANSATPMDIALEEAHAAGERGEVPIGAVIVRDGEIIARAGNRTREFNDVTAHAEILTIRQAGEMLGSERLIDCDLYVTLEPCAMCAAAISFARIRRLYYGASDPKGGGIEHGGRFYTQPTCHHAPEIYPGFCEADARKILKDFFREKR

SEQ ID NO: 164 - protein, 165 aa, synthetic construct
  REGION 1..165: note = pYY-BEM4.55; tr|A0A242H531|A0A242H531_9ENTE polypeptide sequence
MFIVKNNIEVIQQQAELDAKFMKQALKLAKDASNNGNEPFGAVLVKNDKVILTGENQIHTESDPTYHAELGIIRDFCTSQKITDLSEYTLYTSCEPCCMCAGAMVWSNLDRMVYGLGHDELAEIAGFNIMIGSEEIFSKSPNRPEVAKGVLKEAAVPVYVDYFQR

SEQ ID NO: 165 - protein, 181 aa, synthetic construct
  REGION 1..181: note = pYY-BEM4.56; tr|A0A2R6XZE2|A0A2R6XZE2_9BACL polypeptide sequence
MSGRISWHEYFMAQAKLIALRATCTRLMVGAVIVRDRRVIAGGYNGSIAGDEHCIDVGCKVRDGHCIRTIHAEQNALMQCAKFGVSTDGAELYVTHFPCLNCTKLLIQAGIRHIYYEVPYRVDPYAIELLEKAGVGTTQITVDLNAYVQVMSKVSTDPALTYVPESKAQKDEYGQSVGKIV

SEQ ID NO: 166 - protein, 173 aa, synthetic construct
  REGION 1..173: note = pYY-BEM4.57; tr|A0A139SHT6|A0A139SHT6_9BACT polypeptide sequence
MSEANASSESLPSRNSPVELIAEAAGKFGRRPTWDEYFMATAVLISTRSSCERLNVGCVIVTAGESHKNRIVAAGYNGHLPGSPHTSRMRDGHEQATVHAEQNAISDAARRGSSVEGCTAYVTHYPCINCAKILASAGIAKICYRLDYHNDPLVKPMLAEAGIEIVQLGEAAS

SEQ ID NO: 167 - protein, 170 aa, synthetic construct
  REGION 1..170: note = pYY-BEM4.58; tr|A0A261DBH2|A0A261DBH2_9RICK polypeptide sequence
MVMKKKLITVKRSTEFNNFFMEEALKQAQFALDKNEIPVGAIIVNRITNKVIAKAHNIVEQTKNPVLHAEIVAINQSCQILSSKNLSDCDMYVTLEPCVMCSGAISFARIGRLFYAANDPKQGAIENGGRFFNSKSCFYRPEIYSGFSAKISENLIKEFFYNVRYQKCNP

SEQ ID NO: 168 - protein, 146 aa, synthetic construct
  REGION 1..146: note = pYY-BEM4.59; tr|A0A2N0XZK6|A0A2N0XZK6_9VIBR polypeptide sequence
MTDNSLHESYMRQAFELSKSALPGCRPNPPVGCVFVKDGEVVSSGFSQPPGNHHAEAGAIAAYTGSYDGLVAYVTLEPCSFQGRTPSCAKALVRVRPEKVYVAILDPDTRNSGAGIKILEDAGIDVEVGLLGEEVASFLNPYLIRN

SEQ ID NO: 169 - protein, 159 aa, synthetic construct
  REGION 1..159: note = pYY-BEM4.60; tr|A0A1V5R0F9|A0A1V5R0F9_9BACT polypeptide sequence
MTKKETTKLHALDDFCMKKALLLAKRAFRADEVPVGALVVDSSNKVIGRGYNQVEKRKSQRAHAEQLAIEQACKKIGDWRLEGCTLYVTLEPCTMCMGLIKLSRIERVVFGAASPLFGYQLDKNRKSQLYKKGVIKIRKGVGKATAAALLKDFFKNKRM

SEQ ID NO: 170 - protein, 167 aa, synthetic construct
  REGION 1..167: note = pYY-BEM4.61; tr|A0A2W0H8Y3|A0A2W0H8Y3_9BACI polypeptide sequence
MKNNGRLDHEYFMTEALQEAKEAGQRGDLPIGAVIVHNGRIIARGSNMRKTAGIKISHAENNAMHNCAPYLMKHASECVIYTTLEPCIMCLTTLVMANIDSIVFAADDKYMNMKPFIDANSYIRDRIHQYKGGVCRGESEALLRKYSPYAAELALNGTHPHHRKGGA

SEQ ID NO: 171 - protein, 165 aa, synthetic construct
  REGION 1..165: note = pYY-BEM4.62; tr|A0A261BDB7|A0A261BDB7_CAERE polypeptide sequence
LYKLYIFRMTTTKANLTQFEQELVDKAVGAMEKAYCKYSGFKVGAALVCEDGEIIIGANHENASYGATICAERSAMVTALTKGHRKFKLLAVATELEAPCSPCGICRQYLIEFGDYKVILGSSTSDQIIETTTYGLLPYAFTPKSLDDHEKEAEERNHQEGEKKH

SEQ ID NO: 172 - protein, 162 aa, synthetic construct
  REGION 1..162: note = pYY-BEM4.63; tr|A0A2E1PHI6|A0A2E1PHI6_9GAMM polypeptide sequence
MKELLIHSWLMLNSNSKLIMERVIELSEINLKNGKIPIAAVIVDKKNYEIISESQNEDSPIGHAELLAITKALKKLNTNRLDSTNLFVTIEPCPMCAYAISKCHINRLYFGSEDEKGGGVINGPRIFESHNLKKIDYVSHCYHEKTTQLMQSFFQLKRNQQL

SEQ ID NO: 173 - protein, 133 aa, synthetic construct
  REGION 1..133: note = pYY-BEM4.64; tr|A0A378LUA7|A0A378LUA7_9GAMM polypeptide sequence
MDTIIKKMISNAHNTLAHSYSPYSKFSVASCICTDKDNFYTGVNVENSAYGLAICAETSAISAMVTAGEKRIKSMVVMAGTNILCSPCGACRQRIYEFSTPDTLIHLCDKNSILRTFKINELLPEAFKFDFNP

SEQ ID NO: 174 - protein, 370 aa, synthetic construct
  REGION 1..370: note = pYY-BEM4.65; tr|A0A139HQ78|A0A139HQ78_9PEZI polypeptide sequence
MADSLKSKPGHARHDTALIHGLSQSDVQKLSESCVDAKSKAYCPYSHFRVGCAVLLANGDVVQGANVENAAYPVGTCAERVALGTAVGAKKGDFRALAVSTDISPPASPCGMCRQFIREFCELNTPILMYDKDGKSVVMTLEQLLPMSFGPDKLLPPGQLENGLMQTQTQSSFVTRAFSTTSSRRQDDTPQVPQSHYDFFPQTFPQGPPPKTSFSPDLKQLRKEFLQLQAKAHPDLAPQDQKRRAEALSMRINEAYKTLQSPLRRAQYLLSQQGIDVEDETAKLDDSSLLMEVMEAREAVEEVEDEEQLNEIRAENNGRIEESVRVLEDAFRDNEFEKAAQEAIRLRYWVNIEESIQGWEKGNGGGILHH

SEQ ID NO: 175 - protein, 165 aa, synthetic construct
  REGION 1..165: note = pYY-BEM4.66; tr|A0A2A9FXV0|A0A2A9FXV0_9VIBR polypeptide sequence
MCNLKENKDMDKYFHFACDATIEGMREGTGGPFGATLTRNGEVVCSVANTVLKDMDISGHAEMVAVREACKKLDTLDLSDCVMYATCEPCPMCVSVMLWAGIKTCYYASTHLDAAKHGFSDQQLRDYLDGSDTSTLNMVHIEDNRDDCAKIWTEFRHLNETKNDG

SEQ ID NO: 176 - protein, 509 aa, synthetic construct
  REGION 1..509: note = pYY-BEM4.67; tr|A0A1A8AG96|A0A1A8AG96_NOTFU polypeptide sequence
MEHSDRWSRAEPGLSTSSRETRDGSTQTDCKLQGHGPRLSKVNLFTLLSLWMELFPQEQDEENGQSQIRRSGLVVVREGKVVGLHCSGADLHAGQAAILQHGASLANCQLFFSRRPCATCLKMIINAGVRQITFWPGDPEISMLTSNQTHSQRTSQSITEASLDATAVEKLKSNSRPQICVLMQPLAPGVLQFVDETSRRSDFMERMMDDDPELDSEKLFNSDRLRHLKDFCRHFLIQTDQRHKDILSQMGLKNFCVEPYFSNLRSNMTELVEVLAAVAAGMPQQHYGFYREESLSLDPHPVDVSQAVARHCIVQARLLSYRTEDPKVGVGAVIWAKGQSACCCGTGRLYLIGCGYNAYPAGSKYAEYPQMDNKQEDRERRKYRYIVHAEQNALTFRTRDIKPDECSMLFVTKCPCDECIPLIRGAGVKHIYTSDQDRDKDKGDISYLRFGSLKGVCKFIWQRSPPVSSASSLHLTNGCVGKHVRQAEQQIYKNKKLCTKGSSGSSDIC

SEQ ID NO: 177 - protein, 148 aa, synthetic construct
  REGION 1..148: note = pYY-BEM4.68; tr|A0A3E2VN88|A0A3E2VN88_9FIRM polypeptide sequence
MEKEITNMDKQKLIQMAVDGLGRSYAPYSHFHVSAALLCADGTVYTGNNIENAAYTPSVCAERCAIFKAVGDGRREFEAIAVCGGPDGVIEDYCPPCGVCRQVMREFCDPSSFRVLVAKTAEDYREYTLEQLLPDGFGPDHLTGSGER

SEQ ID NO: 178 - protein, 221 aa, synthetic construct
  REGION 1..221: note = pYY-BEM4.69; tr|A0A2D5ZRJ2|A0A2D5ZRJ2_9BACT polypeptide sequence
MARPVHLHTGERRTEEGATESRAVAAVATAITRAPRAPPRPATGRERDGPPPRRVFGGGLRVGDPSGYDRGESKPIGGPLTEKRSDWHSYFMRIAGEVATRATCDRKHVGAVIVRNRTILSTGYNGSIRGMPHCDDVGHDMVDGHCIATIHAEANAILQAARNGVMIQDGSIYITASPCWNCFKLVANAGLKRVYYGEFYRDKRSFEVARRLGIDLMHIEV

SEQ ID NO: 179 - protein, 155 aa, synthetic construct
  REGION 1..155: note = pYY-BEM4.70; tr|A0A1B8WPS3|A0A1B8WPS3_9BACI polypeptide sequence
MEGVQLIYQFQWGNLIMTVNKEDLYLIDVARNTIKTLYVDGKHHVGAAVRTKTGKIYSAVHLEANIGRVSVCAEAIALGKAISEGESEFDTIVAVRHPDPTQENQKIEVVSPCGICRELISDYGKGTNVILKNKEGYIKTVISDLLPNKYIREDN

SEQ ID NO: 180 - protein, 156 aa, synthetic construct
  REGION 1..156: note = pYY-BEM4.71; tr|A0A1W5ZQK9|A0A1W5ZQK9_9BACI polypeptide sequence
MNRFMERAVSLAAENVRVGGQPFGAVLVKDDELVAEGVNEMHLNYDVSGHAELLAIRRAQGELQTHDLSGYTMYASGEPCPMCLSAMYFAGIKDVFYCATVEEAAQVGLEKSKNVYDDLQKSKGERSLVMKQMPLEDDQEDPMKLWDERTNHNGTS

SEQ ID NO: 181 - protein, 340 aa, synthetic construct
  REGION 1..340: note = pYY-BEM4.72; tr|A0A378V0W4|A0A378V0W4_MYCFO polypeptide sequence
MVHAQFDPTARQALAATAVEAKTRKDLTWQQIADAAELSPAFVTAAVLGQHALPARSAEAVAALLGLDDDAALLLQTIPIRGSIPGGIPTDPTIYRFYEMLQVYGTTLKALVHEQFGDGIISAINFKLDVRKVADPEGGERAVITLDGKYLPPNPFDRVRYRGGLMDFAQRTIDIARQNVAEGGRPFATVIVKNGEILAESPNLVAQTHDPTAHAEILAIRKACTRIGTEHLIGATIYVLAQPCPMCLGSLYYCSPDEVVFLTTRDAYEPHYVDDRKYFELNMFYDEFAKPWDQRRLPMRYEPRDAAVDVYKLWQERNGGERRVPGAPTSTRPGKNPRGE

SEQ ID NO: 182 - protein, 157 aa, synthetic construct
  REGION 1..157: note = pYY-BEM4.73; tr|I3XF03|I3XF03_RHIFR polypeptide sequence
MKQRCMSPKSAQRFWDNDMHNNKDRPMSENELFVAAREAMAKAHAPYSKFPVGAAIRAEDGQIYTGANIENLSFPEGWCAETTAISHMVMAGQRKIMEVAVIAEKLALCPPCGGCRQRLAEFSGASTRIYLCDETGIKKSLALSDLLPHSFETEILG

SEQ ID NO: 183 - protein, 595 aa, synthetic construct
  REGION 1..595: note = pYY-BEM4.74; tr|F8IEF3|F8IEF3_ALIAT polypeptide sequence
MDAKELETRGWLCMRAVDVIDKKRRGEALAEEELRFLIEGYVAGRIPDYQMSAFLMAVVWRGMTREETLVLTRLLADSGERLDLSGIPGVKVDKHSTGGVGDKATLVVLPLVASIGVPVIKMSGRGLGHTGGTIDKLESIPGFRTDLSVAELVAQVRQVGIALGGQTADLAPADKKLYALRDVTGTVESLPLIASSVMSKKLAGGADAIVLDVKVGDGAFMKSRSDARRLARLMVEIGEAAGRRTVAVLSNMDQPLGCAIGNALEVAEAIRVLSGEGPFDLAEIALALAEEMTVLAGVAATREEARRMLRQSVAEGRALETLRRWIAAQGGDPAVVDDPSRLPQAPVQMPYLPKKAGFVAKLSALAFGLAAMRLGAGRETKEEAIDPSVGIVLHAKVGDRVQTHRPMFTVHARTGEDALRCIQELEAAIQISDDPVEAPPLILARIDRSEALPYADLMDAAREARDRAYVPYSGFAVGAALELADGRMVTGANVENASYGLTNCAERSAVFRAVAEGGPGTKPEIRAVAVIADSPEPVSPCGACRQVLAEFCSPDTPVYLGNLQGDVRETTVGALLPGAFTDAQMANVRRQDKEA

SEQ ID NO: 184 - protein, 153 aa, synthetic construct
  REGION 1..153: note = pYY-BEM4.75; tr|A0A1G3M638|A0A1G3M638_9SPIR polypeptide sequence
MKTTNINALDKWDLRFLQMAEHVAEWSKDPSTKVGAVIVRPDRTIASVGFNGFARGVRDTVERLWNRELKYPLTVHAELNAILSAHEPVRGHSLYVSPLSPCSNCAGVIIQSGIARVVAKCGQVNNPAQWSESFNLALTAFAEAGVSVILVEH

SEQ ID NO: 185 - protein, 177 aa, synthetic construct
  REGION 1..177: note = pYY-BEM4.76; tr|A0A3D9LFR2|A0A3D9LFR2_9MICC polypeptide sequence
MEQNDHGSSGAFSDPFEDDIPLTASLPRITGTGSGIDWQRLESTARAAMTRAYVPYSRFPVGAAALVEDGRVVAGCNIENASLGLTLCAECSLVSNLQMSGGGRIVAFYCVDGNGEVLMPCGRCRQLLYEFHAPGMRLMGPDGELTMDEVLPLAFGPADMTHLSDSAASTDDPGRTR

SEQ ID NO: 186 - protein, 172 aa, synthetic construct
  REGION 1..172: note = pYY-BEM4.77; tr|A0A3B9YGB5|A0A3B9YGB5_9BACT polypeptide sequence
MAKPISKKYRKLIETAKAARKKAYSPYSRYQVGAAVLTESGRIYSGANMENASYGLCMCAERVAIANAVTRGEKVLQAVCVVGKKARPCGACRQVMLEFSTKETELLMVDIDPNARRDTVIRTRVYSMLPNPFDPFESGMLPQHPQNLLRRRKSPQPRRKRRSRPVHREVSR

SEQ ID NO: 187 - protein, 391 aa, synthetic construct
  REGION 1..391: note = pYY-BEM4.78; tr|A0A182F569|A0A182F569_ANOAL polypeptide sequence
MPRPSQFRVSSSQSLSNSQIQASQSSDSVVDITSYVNAVVKALLNLSCTKTIIKRADLVNIALKGNGRLIGRVLQDANIELKEIYGYELIEVEKSKTMILCSTLAAGSMDELNDANRRRYTFLYLILGYIFMKNGSVPETIVWEFLETLGIEEQQEHNYFGDVRKLYDSLFKQAYLTRTKQALEGLNDDVMLISWGVRSKHEVSKKDILAGFCKVMNRDPVDFKAQYIEANEKDDKMNNNINGTVDGRNTVEYSSLDASVKELIEAAIKVRNNAYCPYSNFAVGAALRTVGGDIVTGCNVENGTFGPSVCAERTAVCKAVSEGHREFTAVAVVAFQETEFTAPCGTCRQTLSEFSRKDIPIYLVKPSPVRVMVTSLFQLLPHAFSPSFLNK

SEQ ID NO: 188 - protein, 151 aa, synthetic construct
  REGION 1..151: note = pYY-BEM4.79; tr|A0A264Z0D4|A0A264Z0D4_9BACI polypeptide sequence
MEPKKLIEEAIVASKQAYVQYSNFHVGAALLTKDGKLYHGCNIENASYGLTNCAERTAIFKAVSEGEKEFQAIAVVGDTEGPISPCGACRQVLAEFFSPDTVVILANLKGDHVVTNINELLPGFFSSKDLQKKVKNCFEKNALGSSCLRPI

SEQ ID NO: 189 - protein, 229 aa, synthetic construct
  REGION 1..229: note = pYY-BEM4.80; tr|A0A1L9Q1R3|A0A1L9Q1R3_ASPVE polypeptide sequence
MPLSAEEAALVETATATINSIPLSEDYSVASAAKASDGRVFTGVNVYHFTGGPCAELVVLGVAAAAGAAQLTHIVAVANEQRGILSPCGRCRQVLLDLQPNIQVIVGKEGSEQSVPVAQLLPFSYRQPDQHTPVIFKALTSSGPVVVDFFATWCGPCKAVAPVVGKLSETYTDVRFIQVDVDKARSISQEHDIRAMPTFVLYKDGKLLDKRVVGGNMKELEEQIKAIIA

SEQ ID NO: 190 - protein, 18 aa, synthetic construct
  REGION 1..18: note = synthetic peptide
KRTADGSEFESPKKKRKV

SEQ ID NO: 191 - protein, 16 aa, synthetic construct
  REGION 1..16: note = synthetic peptide
KRPAATKKAGQAKKKK

SEQ ID NO: 192 - protein, 17 aa, synthetic construct
  REGION 1..17: note = synthetic peptide
KKTELQTTNAENKTKKL

SEQ ID NO: 193 - protein, 19 aa, synthetic construct
  REGION 1..19: note = synthetic peptide
KRGINDRNFWRGENGRKTR

SEQ ID NO: 194 - protein, 16 aa, synthetic construct
  REGION 1..16: note = synthetic peptide
RKSGKIAAIVVKRPRK

SEQ ID NO: 195 - protein, 7 aa, synthetic construct
  REGION 1..7: note = synthetic peptide
PKKKRKV

SEQ ID NO: 196 - protein, 30 aa, synthetic construct
  REGION 1..30: note = synthetic polypeptide
MDSLLMNRRKFLYQFKNVRWAKGRRETYLC

SEQ ID NO: 197 - protein, 1368 aa, Streptococcus pyogenes [sequence omitted]

SEQ ID NO: 198 - DNA, 4104 bp, Streptococcus pyogenes
  misc_feature 1..4104: note = wild type spCas9 polynucleotide sequence
  source 1..4104: mol_type = genomic DNA
atggataagaaatactcaataggcttagatatcggcacaaatagcgtcggatgggcggtgatcactgatgattataaggttccgtctaaaaagttcaaggttctgggaaatacagaccgccacagtatcaaaaaaaatcttataggggctcttttatttggcagtggagagacagcggaagcgactcgtctcaaacggacagctcgtagaaggtatacacgtcggaagaatcgtatttgttatctacaggagattttttcaaatgagatggcgaaagtagatgatagtttctttcatcgacttgaagagtcttttttggtggaagaagacaagaagcatgaacgtcatcctatttttggaaatatagtagatgaagttgcttatcatgagaaatatccaactatctatcatctgcgaaaaaaattggcagattctactgataaagcggatttgcgcttaatctatttggccttagcgcatatgattaagtttcgtggtcattttttgattgagggagatttaaatcctgataatagtgatgtggacaaactatttatccagttggtacaaatctacaatcaattatttgaagaaaaccctattaacgcaagtagagtagatgctaaagcgattctttctgcacgattgagtaaatcaagacgattagaaaatctcattgctcagctccccggtgagaagagaaatggcttgtttgggaatctcattgctttgtcattgggattgacccctaattttaaatcaaattttgatttggcagaagatgctaaattacagctttcaaaagatacttacgatgatgatttagataatttattggcgcaaattggagatcaatatgctgatttgtttttggcagctaagaatttatcagatgctattttactttcagatatcctaagagtaaatagtgaaataactaaggctcccctatcagcttcaatgattaagcgctacgatgaacatcatcaagacttgactcttttaaaagctttagttcgacaacaacttccagaaaagtataaagaaatcttttttgatcaatcaaaaaacggatatgcaggttatattgatgggggagctagccaagaagaattttataaatttatcaaaccaattttagaaaaaatggatggtactgaggaattattggtgaaactaaatcgtgaagatttgctgcgcaagcaacggacctttgacaacggctctattccccatcaaattcacttgggtgagctgcatgctattttgagaagacaagaagacttttatccatttttaaaagacaatcgtgagaagattgaaaaaatcttgacttttcgaattccttattatgttggtccattggcgcgtggcaatagtcgttttgcatggatgactcggaagtctgaagaaacaattaccccatggaattttgaagaagttgtcgataaaggtgcttcagctcaatcatttattgaacgcatgacaaactttgataaaaatcttccaaatgaaaaagtactaccaaaacatagtttgctttatgagtattttacggtttataacgaattgacaaaggtcaaatatgttactgagggaatgcgaaaaccagcatttctttcaggtgaacagaagaaagccattgttgatttactcttcaaaacaaatcgaaaagtaaccgttaagcaattaaaagaagattatttcaaaaaaatagaatgttttgatagtgttgaaatttcaggagttgaagatagatttaatgcttcattaggcgcctaccatgatttgctaaaaattattaaagataaagattttttggataatgaagaaaatgaagatatcttagaggatattgttttaacattgaccttatttgaagatagggggatgattgaggaaagacttaaaacatatgctcacctctttgatgataaggtgatgaaacagcttaaacgtcgccgttatactggttggggacgtttgtctcgaaaattgattaatggtattagggataagcaatctggcaaaacaatattagattttttgaaatcagatggttttgccaatcgcaattttatgcagctgatccatgatgatagtttgacatttaaagaagatattcaaaaagcacaggtgtctggacaaggccatagtttacatgaacagattgctaacttagctggcagtcctgctattaaaaaaggtattttacagactgtaaaaattgttgatgaactggtcaaagtaatggggcataagccagaaaatatcgttattgaaatggcacgtgaaaatcagacaactcaaaagggccagaaaaattcgcgagagcgtatgaaacgaatcgaagaaggtatcaaagaattaggaagtcagattcttaaagagcatcctgttgaaaatactcaattgcaaaatgaaaagctctatctctattatctacaaaatggaagagacatgtatgtggaccaagaattagatattaatcgtttaagtgattatgatgtcgatcacattgttccacaaagtttcattaaagacgattcaatagacaataaggtactaacgcgttctgataaaaatcgtggtaaatcggataacgttccaagtgaagaagtagtcaaaaagatgaaaaactattggagacaacttctaaacgccaagttaatcactcaacgtaagtttgataatttaacgaaagctgaacgtggaggtttgagtgaacttgataaagctggttttatcaaacgccaattggttgaaactcgccaaatcactaagcatgtggcacaaattttggatagtcgcatgaatactaaatacgatgaaaatgataaacttattcgagaggttaaagtgattaccttaaaatctaaattagtttctgacttccgaaaagatttccaattctataaagtacgtgagattaacaattaccatcatgcccatgatgcgtatctaaatgccgtcgttggaactgctttgattaagaaatatccaaaacttgaatcggagtttgtctatggtgattataaagtttatgatgttcgtaaaatgattgctaagtctgagcaagaaataggcaaagcaaccgcaaaatatttcttttactctaatatcatgaacttcttcaaaacagaaattacacttgcaaatggagagattcgcaaacgccctctaatcgaaactaatggggaaactggagaaattgtctgggataaagggcgagattttgccacagtgcgcaaagtattgtccatgccccaagtcaatattgtcaagaaaacagaagtacagacaggcggattctccaaggagtcaattttaccaaaaagaaattcggacaagcttattgctcgtaaaaaagactgggatccaaaaaaatatggtggttttgatagtccaacggtagcttattcagtcctagtggttgctaaggtggaaaaagggaaatcgaagaagttaaaatccgttaaagagttactagggatcacaattatggaaagaagttcctttgaaaaaaatccgattgactttttagaagctaaaggatataaggaagttaaaaaagacttaatcattaaactacctaaatatagtctttttgagttagaaaacggtcgtaaacggatgctggctagtgccggagaattacaaaaaggaaatgagctggctctgccaagcaaatatgtgaattttttatatttagctagtcattatgaaaagttgaagggtagtccagaagataacgaacaaaaacaattgtttgtggagcagcataagcattatttagatgagattattgagcaaatcagtgaattttctaagcgtgttattttagcagatgccaatttagataaagttcttagtgcatataacaaacatagagacaaaccaatacgtgaacaagcagaaaatattattcatttatttacgttgacgaatcttggagctcccgctgcttttaaatattttgatacaacaattgatcgtaaacgatatacgtctacaaaagaagttttagatgccactcttatccatcaatccatcactggtctttatgaaacacgcattgatttgagtcagctaggaggtgactga

SEQ ID NO: 199 - protein, 1367 aa, Streptococcus pyogenes
  REGION 1..1367: note = MISC_FEATURE - spCas9 polypeptide sequence
MDKKYSIGLDIGTNSVGWAVITDDYKVPSKKFKVLGNTDRHSIKKNLIGALLFGSGETAEATRLKRTARRRYTRRKNRICYLQEIFSNEMAKVDDSFFHRLEESFLVEEDKKHERHPIFGNIVDEVAYHEKYPTIYHLRKKLADSTDKADLRLIYLALAHMIKFRGHFLIEGDLNPDNSDVDKLFIQLVQIYNQLFEENPINASRVDAKAILSARLSKSRRLENLIAQLPGEKRNGLFGNLIALSLGLTPNFKSNFDLAEDAKLQLSKDTYDDDLDNLLAQIGDQYADLFLAAKNLSDAILLSDILRVNSEITKAPLSASMIKRYDEHHQDLTLLKALVRQQLPEKYKEIFFDQSKNGYAGYIDGGASQEEFYKFIKPILEKMDGTEELLVKLNREDLLRKQRTFDNGSIPHQIHLGELHAILRRQEDFYPFLKDNREKIEKILTFRIPYYVGPLARGNSRFAWMTRKSEETITPWNFEEVVDKGASAQSFIERMTNFDKNLPNEKVLPKHSLLYEYFTVYNELTKVKYVTEGMRKPAFLSGEQKKAIVDLLFKTNRKVTVKQLKEDYFKKIECFDSVEISGVEDRFNASLGAYHDLLKIIKDKDFLDNEENEDILEDIVLTLTLFEDRGMIEERLKTYAHLFDDKVMKQLKRRRYTGWGRLSRKLINGIRDKQSGKTILDFLKSDGFANRNFMQLIHDDSLTFKEDIQKAQVSGQGHSLHEQIANLAGSPAIKKGILQTVKIVDELVKVMGHKPENIVIEMARENQTTQKGQKNSRERMKRIEEGIKELGSQILKEHPVENTQLQNEKLYLYYLQNGRDMYVDQELDINRLSDYDVDHIVPQSFIKDDSIDNKVLTRSDKNRGKSDNVPSEEVVKKMKNYWRQLLNAKLITQRKFDNLTKAERGGLSELDKAGFIKRQLVETRQITKHVAQILDSRMNTKYDENDKLIREVKVITLKSKLVSDFRKDFQFYKVREINNYHHAHDAYLNAVVGTALIKKYPKLESEFVYGDYKVYDVRKMIAKSEQEIGKATAKYFFYSNIMNFFKTEITLANGEIRKRPLIETNGETGEIVWDKGRDFATVRKVLSMPQVNIVKKTEVQTGGFSKESILPKRNSDKLIARKKDWDPKKYGGFDSPTVAYSVLVVAKVEKGKSKKLKSVKELLGITIMERSSFEKNPIDFLEAKGYKEVKKDLIIKLPKYSLFELENGRKRMLASAGELQKGNELALPSKYVNFLYLASHYEKLKGSPEDNEQKQLFVEQHKHYLDEIIEQISEFSKRVILADANLDKVLSAYNKHRDKPIREQAENIIHLFTLTNLGAPAAFKYFDTTIDRKRYTSTKEVLDATLIHQSITGLYETRIDLSQLGGD

SEQ ID NO: 200 - DNA, 4212 bp, synthetic construct
  misc_feature 1..4212: note = wild-type Cas9 polynucleotide sequence
  misc_feature 5..58: note = RuvC domain
  misc_feature 718..764: note = RuvC domain
  misc_feature 772..901: note = HNH domain
  misc_feature 906..1101: note = RuvC domain
  source 1..4212: mol_type = other DNA
atggataaaaagtattctattggtttagacatcggcactaattccgttggatgggctgtcataaccgatgaatacaaagtaccttcaaagaaatttaaggtgttggggaacacagaccgtcattcgattaaaaagaatcttatcggtgccctcctattcgatagtggcgaaacggcagaggcgactcgcctgaaacgaaccgctcggagaaggtatacacgtcgcaagaaccgaatatgttacttacaagaaatttttagcaatgagatggccaaagttgacgattctttctttcaccgtttggaagagtccttccttgtcgaagaggacaagaaacatgaacggcaccccatctttggaaacatagtagatgaggtggcatatcatgaaaagtacccaacgatttatcacctcagaaaaaagctagttgactcaactgataaagcggacctgaggttaatctacttggctcttgcccatatgataaagttccgtgggcactttctcattgagggtgatctaaatccggacaactcggatgtcgacaaactgttcatccagttagtacaaacctataatcagttgtttgaagagaaccctataaatgcaagtggcgtggatgcgaaggctattcttagcgcccgcctctctaaatcccgacggctagaaaacctgatcgcacaattacccggagagaagaaaaatgggttgttcggtaaccttatagcgctctcactaggcctgacaccaaattttaagtcgaacttcgacttagctgaagatgccaaattgcagcttagtaaggacacgtacgatgacgatctcgacaatctactggcacaaattggagatcagtatgcggacttatttttggctgccaaaaaccttagcgatgcaatcctcctatctgacatactgagagttaatactgagattaccaaggcgccgttatccgcttcaatgatcaaaaggtacgatgaacatcaccaagacttgacacttctcaaggccctagtccgtcagcaactgcctgagaaatataaggaaatattctttgatcagtcgaaaaacgggtacgcaggttatattgacggcggagcgagtcaagaggaattctacaagtttatcaaacccatattagagaagatggatgggacggaagagttgcttgtaaaactcaatcgcgaagatctactgcgaaagcagcggactttcgacaacggtagcattccacatcaaatccacttaggcgaattgcatgctatacttagaaggcaggaggatttttatccgttcctcaaagacaatcgtgaaaagattgagaaaatcctaacctttcgcataccttactatgtgggacccctggcccgagggaactctcggttcgcatggatgacaagaaagtccgaagaaacgattactccatggaattttgaggaagttgtcgataaaggtgcgtcagctcaatcgttcatcgagaggatgaccaactttgacaagaatttaccgaacgaaaaagtattgcctaagcacagtttactttacgagtatttcacagtgtacaatgaactcacgaaagttaagtatgtcactgagggcatgcgtaaacccgcctttctaagcggagaacagaagaaagcaatagtagatctgttattcaagaccaaccgcaaagtgacagttaagcaattgaaagaggactactttaagaaaattgaatgcttcgattctgtcgagatctccggggtagaagatcgatttaatgcgtcacttggtacgtatcatgacctcctaaagataattaaagataaggacttcctggataacgaagagaatgaagatatcttagaagatatagtgttgactcttaccctctttgaagatcgggaaatgattgaggaaagactaaaaacatacgctcacctgttcgacgataaggttatgaaacagttaaagaggcgtcgctatacgggctggggacgattgtcgcggaaacttatcaacgggataagagacaagcaaagtggtaaaactattctcgattttctaaagagcgacggcttcgccaataggaactttatgcagctgatccatgatgactctttaaccttcaaagaggatatacaaaaggcacaggtttccggacaaggggactcattgcacgaacatattgcgaatcttgctggttcgccagccatcaaaaagggcatactccagacagtcaaagtagtggatgagctagttaaggtcatgggacgtcacaaaccggaaaacattgtaatcgagatggcacgcgaaaatcaaacgactcagaaggggcaaaaaaacagtcgagagcggatgaagagaatagaagagggtattaaagaactgggcagccagatcttaaaggagcatcctgtggaaaatacccaattgcagaacgagaaactttacctctattacctacaaaatggaagggacatgtatgttgatcaggaactggacataaaccgtttatctgattacgacgtcgatcacattgtaccccaatcctttttgaaggacgattcaatcgacaataaagtgcttacacgctcggataagaaccgagggaaaagtgacaatgttccaagcgaggaagtcgtaaagaaaatgaagaactattggcggcagctcctaaatgcgaaactgataacgcaaagaaagttcgataacttaactaaagctgagaggggtggcttgtctgaacttgacaaggccggatttattaaacgtcagctcgtggaaacccgccaaatcacaaagcatgttgcacagatactagattcccgaatgaatacgaaatacgacgagaacgataagctgattcgggaagtcaaagtaatcactttaaagtcaaaattggtgtcggacttcagaaaggattttcaattctataaagttagggagataaataactaccaccatgcgcacgacgcttatcttaatgccgtcgtagggaccgcactcattaagaaatacccgaagctagaaagtgagtttgtgtatggtgattacaaagtttatgacgtccgtaagatgatcgcgaaaagcgaacaggagataggcaaggctacagccaaatacttcttttattctaacattatgaatttctttaagacggaaatcactctggcaaacggagagatacgcaaacgacctttaattgaaaccaatggggagacaggtgaaatcgtatgggataagggccgggacttcgcgacggtgagaaaagttttgtccatgccccaagtcaacatagtaaagaaaactgaggtgcagaccggagggttttcaaaggaatcgattcttccaaaaaggaatagtgataagctcatcgctcgtaaaaaggactgggacccgaaaaagtacggtggcttcgatagccctacagttgcctattctgtcctagtagtggcaaaagttgagaagggaaaatccaagaaactgaagtcagtcaaagaattattggggataacgattatggagcgctcgtcttttgaaaagaaccccatcgacttccttgaggcgaaaggttacaaggaagtaaaaaaggatctcataattaaactaccaaagtatagtctgtttgagttagaaaatggccgaaaacggatgttggctagcgccggagagcttcaaaaggggaacgaactcgcactaccgtctaaatacgtgaatttcctgtatttagcgtcccattacgagaagttgaaaggttcacctgaagataacgaacagaagcaactttttgttgagcagcacaaacattatctcgacgaaatcatagagcaaatttcggaattcagtaagagagtcatcctagctgatgccaatctggacaaagtattaagcgcatacaacaagcacagggataaacccatacgtgagcaggcggaaaatattatccatttgtttactcttaccaacctcggcgctccagccgcattcaagtattttgacacaacgatagatcgcaaacgatacacttctaccaaggaggtgctagacgcgacactgattcaccaatccatcacgggattatatgaaactcggatagatttgtcacagcttgggggtgacggatcccccaagaagaagaggaaagtctcgagcgactacaaagaccatgacggtgattataaagatcatgacatcgattacaaggatgacgatgacaaggctgcagga

SEQ ID NO: 201 - protein, 1368 aa, synthetic construct
  REGION 1..1368: note = exemplary catalytically active Cas9 nickase (nCas9) polypeptide sequence
MDKKYSIGLAIGTNSVGWAVITDEYKVPSKKFKVLGNTDRHSIKKNLIGALLFDSGETAEATRLKRTARRRYTRRKNRICYLQEIFSNEMAKVDDSFFHRLEESFLVEEDKKHERHPIFGNIVDEVAYHEKYPTIYHLRKKLVDSTDKADLRLIYLALAHMIKFRGHFLIEGDLNPDNSDVDKLFIQLVQTYNQLFEENPINASGVDAKAILSARLSKSRRLENLIAQLPGEKKNGLFGNLIALSLGLTPNFKSNFDLAEDAKLQLSKDTYDDDLDNLLAQIGDQYADLFLAAKNLSDAILLSDILRVNTEITKAPLSASMIKRYDEHHQDLTLLKALVRQQLPEKYKEIFFDQSKNGYAGYIDGGASQEEFYKFIKPILEKMDGTEELLVKLNREDLLRKQRTFDNGSIPHQIHLGELHAILRRQEDFYPFLKDNREKIEKILTFRIPYYVGPLARGNSRFAWMTRKSEETITPWNFEEVVDKGASAQSFIERMTNFDKNLPNEKVLPKHSLLYEYFTVYNELTKVKYVTEGMRKPAFLSGEQKKAIVDLLFKTNRKVTVKQLKEDYFKKIECFDSVEISGVEDRFNASLGTYHDLLKIIKDKDFLDNEENEDILEDIVLTLTLFEDREMIEERLKTYAHLFDDKVMKQLKRRRYTGWGRLSRKLINGIRDKQSGKTILDFLKSDGFANRNFMQLIHDDSLTFKEDIQKAQVSGQGDSLHEHIANLAGSPAIKKGILQTVKVVDELVKVMGRHKPENIVIEMARENQTTQKGQKNSRERMKRIEEGIKELGSQILKEHPVENTQLQNEKLYLYYLQNGRDMYVDQELDINRLSDYDVDHIVPQSFLKDDSIDNKVLTRSDKNRGKSDNVPSEEVVKKMKNYWRQLLNAKLITQRKFDNLTKAERGGLSELDKAGFIKRQLVETRQITKHVAQILDSRMNTKYDENDKLIREVKVITLKSKLVSDFRKDFQFYKVREINNYHHAHDAYLNAVVGTALIKKYPKLESEFVYGDYKVYDVRKMIAKSEQEIGKATAKYFFYSNIMNFFKTEITLANGEIRKRPLIETNGETGEIVWDKGRDFATVRKVLSMPQVNIVKKTEVQTGGFSKESILPKRNSDKLIARKKDWDPKKYGGFDSPTVAYSVLVVAKVEKGKSKKLKSVKELLGITIMERSSFEKNPIDFLEAKGYKEVKKDLIIKLPKYSLFELENGRKRMLASAGELQKGNELALPSKYVNFLYLASHYEKLKGSPEDNEQKQLFVEQHKHYLDEIIEQISEFSKRVILADANLDKVLSAYNKHRDKPIREQAENIIHLFTLTNLGAPAAFKYFDTTIDRKRYTSTKEVLDATLIHQSITGLYETRIDLSQLGGD

SEQ ID NO: 202 - DNA, 4107 bp, Streptococcus pyogenes
  misc_feature 1..4107: note = Cas9 from Streptococcus pyogenes (NCBI Ref. Seq.: NC_002737.2)polynucleotide sequence
  source 1..4107: mol_type = genomic DNA
atggataagaaatactcaataggcttagatatcggcacaaatagcgtcggatgggcggtgatcactgatgaatataaggttccgtctaaaaagttcaaggttctgggaaatacagaccgccacagtatcaaaaaaaatcttataggggctcttttatttgacagtggagagacagcggaagcgactcgtctcaaacggacagctcgtagaaggtatacacgtcggaagaatcgtatttgttatctacaggagattttttcaaatgagatggcgaaagtagatgatagtttctttcatcgacttgaagagtcttttttggtggaagaagacaagaagcatgaacgtcatcctatttttggaaatatagtagatgaagttgcttatcatgagaaatatccaactatctatcatctgcgaaaaaaattggtagattctactgataaagcggatttgcgcttaatctatttggccttagcgcatatgattaagtttcgtggtcattttttgattgagggagatttaaatcctgataatagtgatgtggacaaactatttatccagttggtacaaacctacaatcaattatttgaagaaaaccctattaacgcaagtggagtagatgctaaagcgattctttctgcacgattgagtaaatcaagacgattagaaaatctcattgctcagctccccggtgagaagaaaaatggcttatttgggaatctcattgctttgtcattgggtttgacccctaattttaaatcaaattttgatttggcagaagatgctaaattacagctttcaaaagatacttacgatgatgatttagataatttattggcgcaaattggagatcaatatgctgatttgtttttggcagctaagaatttatcagatgctattttactttcagatatcctaagagtaaatactgaaataactaaggctcccctatcagcttcaatgattaaacgctacgatgaacatcatcaagacttgactcttttaaaagctttagttcgacaacaacttccagaaaagtataaagaaatcttttttgatcaatcaaaaaacggatatgcaggttatattgatgggggagctagccaagaagaattttataaatttatcaaaccaattttagaaaaaatggatggtactgaggaattattggtgaaactaaatcgtgaagatttgctgcgcaagcaacggacctttgacaacggctctattccccatcaaattcacttgggtgagctgcatgctattttgagaagacaagaagacttttatccatttttaaaagacaatcgtgagaagattgaaaaaatcttgacttttcgaattccttattatgttggtccattggcgcgtggcaatagtcgttttgcatggatgactcggaagtctgaagaaacaattaccccatggaattttgaagaagttgtcgataaaggtgcttcagctcaatcatttattgaacgcatgacaaactttgataaaaatcttccaaatgaaaaagtactaccaaaacatagtttgctttatgagtattttacggtttataacgaattgacaaaggtcaaatatgttactgaaggaatgcgaaaaccagcatttctttcaggtgaacagaagaaagccattgttgatttactcttcaaaacaaatcgaaaagtaaccgttaagcaattaaaagaagattatttcaaaaaaatagaatgttttgatagtgttgaaatttcaggagttgaagatagatttaatgcttcattaggtacctaccatgatttgctaaaaattattaaagataaagattttttggataatgaagaaaatgaagatatcttagaggatattgttttaacattgaccttatttgaagatagggagatgattgaggaaagacttaaaacatatgctcacctctttgatgataaggtgatgaaacagcttaaacgtcgccgttatactggttggggacgtttgtctcgaaaattgattaatggtattagggataagcaatctggcaaaacaatattagattttttgaaatcagatggttttgccaatcgcaattttatgcagctgatccatgatgatagtttgacatttaaagaagacattcaaaaagcacaagtgtctggacaaggcgatagtttacatgaacatattgcaaatttagctggtagccctgctattaaaaaaggtattttacagactgtaaaagttgttgatgaattggtcaaagtaatggggcggcataagccagaaaatatcgttattgaaatggcacgtgaaaatcagacaactcaaaagggccagaaaaattcgcgagagcgtatgaaacgaatcgaagaaggtatcaaagaattaggaagtcagattcttaaagagcatcctgttgaaaatactcaattgcaaaatgaaaagctctatctctattatctccaaaatggaagagacatgtatgtggaccaagaattagatattaatcgtttaagtgattatgatgtcgatcacattgttccacaaagtttccttaaagacgattcaatagacaataaggtcttaacgcgttctgataaaaatcgtggtaaatcggataacgttccaagtgaagaagtagtcaaaaagatgaaaaactattggagacaacttctaaacgccaagttaatcactcaacgtaagtttgataatttaacgaaagctgaacgtggaggtttgagtgaacttgataaagctggttttatcaaacgccaattggttgaaactcgccaaatcactaagcatgtggcacaaattttggatagtcgcatgaatactaaatacgatgaaaatgataaacttattcgagaggttaaagtgattaccttaaaatctaaattagtttctgacttccgaaaagatttccaattctataaagtacgtgagattaacaattaccatcatgcccatgatgcgtatctaaatgccgtcgttggaactgctttgattaagaaatatccaaaacttgaatcggagtttgtctatggtgattataaagtttatgatgttcgtaaaatgattgctaagtctgagcaagaaataggcaaagcaaccgcaaaatatttcttttactctaatatcatgaacttcttcaaaacagaaattacacttgcaaatggagagattcgcaaacgccctctaatcgaaactaatggggaaactggagaaattgtctgggataaagggcgagattttgccacagtgcgcaaagtattgtccatgccccaagtcaatattgtcaagaaaacagaagtacagacaggcggattctccaaggagtcaattttaccaaaaagaaattcggacaagcttattgctcgtaaaaaagactgggatccaaaaaaatatggtggttttgatagtccaacggtagcttattcagtcctagtggttgctaaggtggaaaaagggaaatcgaagaagttaaaatccgttaaagagttactagggatcacaattatggaaagaagttcctttgaaaaaaatccgattgactttttagaagctaaaggatataaggaagttaaaaaagacttaatcattaaactacctaaatatagtctttttgagttagaaaacggtcgtaaacggatgctggctagtgccggagaattacaaaaaggaaatgagctggctctgccaagcaaatatgtgaattttttatatttagctagtcattatgaaaagttgaagggtagtccagaagataacgaacaaaaacaattgtttgtggagcagcataagcattatttagatgagattattgagcaaatcagtgaattttctaagcgtgttattttagcagatgccaatttagataaagttcttagtgcatataacaaacatagagacaaaccaatacgtgaacaagcagaaaatattattcatttatttacgttgacgaatcttggagctcccgctgcttttaaatattttgatacaacaattgatcgtaaacgatatacgtctacaaaagaagttttagatgccactcttatccatcaatccatcactggtctttatgaaacacgcattgatttgagtcagctaggaggtgactga

SEQ ID NO: 203 - protein, 1368 aa, synthetic construct
  REGION 1..1368: note = catalytically inactive Cas9 (dCas9)polypeptide sequence
  REGION 5..58: note = MISC_FEATURE - RuvC domain
  REGION 718..764: note = MISC_FEATURE - RuvC domain
  REGION 773..902: note = MISC_FEATURE - HNH domain
  REGION 907..1102: note = MISC_FEATURE - RuvC domain
MDKKYSIGLAIGTNSVGWAVITDEYKVPSKKFKVLGNTDRHSIKKNLIGALLFDSGETAEATRLKRTARRRYTRRKNRICYLQEIFSNEMAKVDDSFFHRLEESFLVEEDKKHERHPIFGNIVDEVAYHEKYPTIYHLRKKLVDSTDKADLRLIYLALAHMIKFRGHFLIEGDLNPDNSDVDKLFIQLVQTYNQLFEENPINASGVDAKAILSARLSKSRRLENLIAQLPGEKKNGLFGNLIALSLGLTPNFKSNFDLAEDAKLQLSKDTYDDDLDNLLAQIGDQYADLFLAAKNLSDAILLSDILRVNTEITKAPLSASMIKRYDEHHQDLTLLKALVRQQLPEKYKEIFFDQSKNGYAGYIDGGASQEEFYKFIKPILEKMDGTEELLVKLNREDLLRKQRTFDNGSIPHQIHLGELHAILRRQEDFYPFLKDNREKIEKILTFRIPYYVGPLARGNSRFAWMTRKSEETITPWNFEEVVDKGASAQSFIERMTNFDKNLPNEKVLPKHSLLYEYFTVYNELTKVKYVTEGMRKPAFLSGEQKKAIVDLLFKTNRKVTVKQLKEDYFKKIECFDSVEISGVEDRFNASLGTYHDLLKIIKDKDFLDNEENEDILEDIVLTLTLFEDREMIEERLKTYAHLFDDKVMKQLKRRRYTGWGRLSRKLINGIRDKQSGKTILDFLKSDGFANRNFMQLIHDDSLTFKEDIQKAQVSGQGDSLHEHIANLAGSPAIKKGILQTVKVVDELVKVMGRHKPENIVIEMARENQTTQKGQKNSRERMKRIEEGIKELGSQILKEHPVENTQLQNEKLYLYYLQNGRDMYVDQELDINRLSDYDVDAIVPQSFLKDDSIDNKVLTRSDKNRGKSDNVPSEEVVKKMKNYWRQLLNAKLITQRKFDNLTKAERGGLSELDKAGFIKRQLVETRQITKHVAQILDSRMNTKYDENDKLIREVKVITLKSKLVSDFRKDFQFYKVREINNYHHAHDAYLNAVVGTALIKKYPKLESEFVYGDYKVYDVRKMIAKSEQEIGKATAKYFFYSNIMNFFKTEITLANGEIRKRPLIETNGETGEIVWDKGRDFATVRKVLSMPQVNIVKKTEVQTGGFSKESILPKRNSDKLIARKKDWDPKKYGGFDSPTVAYSVLVVAKVEKGKSKKLKSVKELLGITIMERSSFEKNPIDFLEAKGYKEVKKDLIIKLPKYSLFELENGRKRMLASAGELQKGNELALPSKYVNFLYLASHYEKLKGSPEDNEQKQLFVEQHKHYLDEIIEQISEFSKRVILADANLDKVLSAYNKHRDKPIREQAENIIHLFTLTNLGAPAAFKYFDTTIDRKRYTSTKEVLDATLIHQSITGLYETRIDLSQLGGD

SEQ ID NO: 204 - protein, 345 aa, Sulfolobus islandicus
  REGION 1..345: note = MISC_FEATURE - tr|F0NN87|F0NN87_SULIHCRISPR-associatedCasx protein OS =Sulfolobus islandicus (strain HVE10/4) GN = SiH_0402 PE=4; SV = 1);CasX polypeptide sequence
MEVPLYNIFGDNYIIQVATEAENSTIYNNKVEIDDEELRNVLNLAYKIAKNNEDAAAERRGKAKKKKGEEGETTTSNIILPLSGNDKNPWTETLKCYNFPTTVALSEVFKNFSQVKECEEVSAPSFVKPEFYEFGRSPGMVERTRRVKLEVEPHYLIIAAAGWVLTRLGKAKVSEGDYVGVNVFTPTRGILYSLIQNVNGIVPGIKPETAFGLWIARKVVSSVTNPNVSVVRIYTISDAVGQNPTTINGGFSIDLTKLLEKRYLLSERLEAIARNALSISSNMRERYIVLANYIYEYLTGSKRLEDLLYFANRDLIMNLNSDDGKVRDLKLISAYVNGELIRGEG

SEQ ID NO: 205 - protein, 345 aa, Sulfolobus islandicus
  REGION 1..345: note = MISC_FEATURE - tr|F0NH53|F0NH53_SULIR CRISPR associated protein, Casx OS =Sulfolobus islandicus (strain REY15A) GN=SiRe_0771 PE=4 SV=1);CasX polypeptide sequence
MEVPLYNIFGDNYIIQVATEAENSTIYNNKVEIDDEELRNVLNLAYKIAKNNEDAAAERRGKAKKKKGEEGETTTSNIILPLSGNDKNPWTETLKCYNFPTTVALSEVFKNFSQVKECEEVSAPSFVKPEFYKFGRSPGMVERTRRVKLEVEPHYLIMAAAGWVLTRLGKAKVSEGDYVGVNVFTPTRGILYSLIQNVNGIVPGIKPETAFGLWIARKVVSSVTNPNVSVVSIYTISDAVGQNPTTINGGFSIDLTKLLEKRDLLSERLEAIARNALSISSNMRERYIVLANYIYEYLTGSKRLEDLLYFANRDLIMNLNSDDGKVRDLKLISAYVNGELIRGEG

SEQ ID NO: 206 - protein, 987 aa, unidentified
  REGION 1..987: note = MISC_FEATURE - CasX polypeptide sequence
MEKRINKIRKKLSADNATKPVSRSGPMKTLLVRVMTDDLKKRLEKRRKKPEVMPQVISNNAANNLRMLLDDYTKMKEAILQVYWQEFKDDHVGLMCKFAQPASKKIDQNKLKPEMDEKGNLTTAGFACSQCGQPLFVYKLEQVSEKGKAYTNYFGRCNVAEHEKLILLAQLKPVKDSDEAVTYSLGKFGQRALDFYSIHVTKESTHPVKPLAQIAGNRYASGPVGKALSDACMGTIASFLSKYQDIIIEHQKVVKGNQKRLESLRELAGKENLEYPSVTLPPQPHTKEGVDFAYNEVIARVRMWVNLNLWQKLKLSRDDAKPLLRLKGFPSFPVVERRENEVDWWNTINEVKKLIDAKRDMGRVFWSGVTAEKRNTILEGYNYLPNENDHKKREGSLENPKKPAKRQFGDLLLYLEKKYAGDWGKVFDEAWERIDKKIAGLTSHIEREEARNAEDAQSKAVLTDWLRAKASFVLERLKEMDEKEFYACEIQLQKWYGDLRGNPFAVEAENRVVDISGFSIGSDGHSIQYRNLLAWKYLENGKREFYLLMNYGKKGRIRFTDGTDIKKSGKWQGLLYGGGKAKVIDLTFDPDDEQLIILPLAFGTRQGREFIWNDLLSLETGLIKLANGRVIEKTIYNKKIGRDEPALFVALTFERREVVDPSNIKPVNLIGVARGENIPAVIALTDPEGCPLPEFKDSSGGPTDILRIGEGYKEKQRAIQAAKEVEQRRAGGYSRKFASKSRNLADDMVRNSARDLFYHAVTHDAVLVFANLSRGFGRQGKRTFMTERQYTKMEDWLTAKLAYEGLTSKTYLSKTLAQYTSKTCSNCGFTITYADMDVMLVRLKKTSDGWATTLNNKELKAEYQITYYNRYKRQTVEKELSAELDRLSEESGNNDISKWTKGRRDEALFLLKKRFSHRPVQEQFVCLDCGHEVHAAEQAALNIARSWLFLNSNSTEFKSYKSGKQPFVGAWQAFYKRRLKEVWKPNA

SEQ ID NO: 207 - protein, 1210 aa, unidentified
  REGION 1..1210: note = MISC_FEATURE - APG80656.1 CRISPR-associated protein CasY [uncultured Parcubacteria group bacterium]; CasY polypeptide sequence
MSKRHPRISGVKGYRLHAQRLEYTGKSGAMRTIKYPLYSSPSGGRTVPREIVSAINDDYVGLYGLSNFDDLYNAEKRNEEKVYSVLDFWYDCVQYGAVFSYTAPGLLKNVAEVRGGSYELTKTLKGSHLYDELQIDKVIKFLNKKEISRANGSLDKLKKDIIDCFKAEYRERHKDQCNKLADDIKNAKKDAGASLGERQKKLFRDFFGISEQSENDKPSFTNPLNLTCCLLPFDTVNNNRNRGEVLFNKLKEYAQKLDKNEGSLEMWEYIGIGNSGTAFSNFLGEGFLGRLRENKITELKKAMMDITDAWRGQEQEEELEKRLRILAALTIKLREPKFDNHWGGYRSDINGKLSSWLQNYINQTVKIKEDLKGHKKDLKKAKEMINRFGESDTKEEAVVSSLLESIEKIVPDDSADDEKPDIPAIAIYRRFLSDGRLTLNRFVQREDVQEALIKERLEAEKKKKPKKRKKKSDAEDEKETIDFKELFPHLAKPLKLVPNFYGDSKRELYKKYKNAAIYTDALWKAVEKIYKSAFSSSLKNSFFDTDFDKDFFIKRLQKIFSVYRRFNTDKWKPIVKNSFAPYCDIVSLAENEVLYKPKQSRSRKSAAIDKNRVRLPSTENIAKAGIALARELSVAGFDWKDLLKKEEHEEYIDLIELHKTALALLLAVTETQLDISALDFVENGTVKDFMKTRDGNLVLEGRFLEMFSQSIVFSELRGLAGLMSRKEFITRSAIQTMNGKQAELLYIPHEFQSAKITTPKEMSRAFLDLAPAEFATSLEPESLSEKSLLKLKQMRYYPHYFGYELTRTGQGIDGGVAENALRLEKSPVKKREIKCKQYKTLGRGQNKIVLYVRSSYYQTQFLEWFLHRPKNVQTDVAVSGSFLIDEKKVKTRWNYDALTVALEPVSGSERVFVSQPFTIFPEKSAEEEGQRYLGIDIGEYGIAYTALEITGDSAKILDQNFISDPQLKTLREEVKGLKLDQRRGTFAMPSTKIARIRESLVHSLRNRIHHLALKHKAKIVYELEVSRFEEGKQKIKKVYATLKKADVYSEIDADKNLQTTVWGKLAVASEISASYTSQFCGACKKLWRAEMQVDETITTQELIGTVRVIKGGTLIDAIKDFMRPPIFDENDTPFPKYRDFCDKHHISKKMRGNSCLFICPFCRANADADIQASQTIALLRYVKEEKKVEDYFERFRKLKNIKVLGQMKKI

SEQ ID NO: 208 - protein, 1082 aa, Neisseria meningitidis
  REGION 1..1082: note = MISC_FEATURE - NCBI Reference: WP_002235162.1; type II CRISPR RNA-guided endonuclease Cas9; Nme1Cas9 polypeptide sequence
MAAFKPNPINYILGLDIGIASVGWAMVEIDEDENPICLIDLGVRVFERAEVPKTGDSLAMARRLARSVRRLTRRRAHRLLRARRLLKREGVLQAADFDENGLIKSLPNTPWQLRAAALDRKLTPLEWSAVLLHLIKHRGYLSQRKNEGETADKELGALLKGVADNAHALQTGDFRTPAELALNKFEKESGHIRNQRGDYSHTFSRKDLQAELILLFEKQKEFGNPHVSGGLKEGIETLLMTQRPALSGDAVQKMLGHCTFEPAEPKAAKNTYTAERFIWLTKLNNLRILEQGSERPLTDTERATLMDEPYRKSKLTYAQARKLLGLEDTAFFKGLRYGKDNAEASTLMEMKAYHAISRALEKEGLKDKKSPLNLSPELQDEIGTAFSLFKTDEDITGRLKDRIQPEILEALLKHISFDKFVQISLKALRRIVPLMEQGKRYDEACAEIYGDHYGKKNTEEKIYLPPIPADEIRNPVVLRALSQARKVINGVVRRYGSPARIHIETAREVGKSFKDRKEIEKRQEENRKDREKAAAKFREYFPNFVGEPKSKDILKLRLYEQQHGKCLYSGKEINLGRLNEKGYVEIDHALPFSRTWDDSFNNKVLVLGSENQNKGNQTPYEYFNGKDNSREWQEFKARVETSRFPRSKKQRILLQKFDEDGFKERNLNDTRYVNRFLCQFVADRMRLTGKGKKRVFASNGQITNLLRGFWGLRKVRAENDRHHALDAVVVACSTVAMQQKITRFVRYKEMNAFDGKTIDKETGEVLHQKTHFPQPWEFFAQEVMIRVFGKPDGKPEFEEADTPEKLRTLLAEKLSSRPEAVHEYVTPLFVSRAPNRKMSGQGHMETVKSAKRLDEGVSVLRVPLTQLKLKDLEKMVNREREPKLYEALKARLEAHKDDPAKAFAEPFYKYDKAGNRTQQVKAVRVEQVQKTGVWVRNHNGIADNATMVRVDVFEKGDKYYLVPIYSWQVAKGILPDRAVVQGKDEEDWQLIDDSFNFKFSLHPNDLVEVITKKARMFGYFASCHRGTGNINIRIHDLDHKIGKNGILEGIGVKTALSFQKYQIDELGKEIRPCRLKKRPPVR

SEQ ID NO: 209 - protein, 1082 aa, Neisseria meningitidis
  REGION 1..1082: note = MISC_FEATURE - NCBI Reference: WP_002230835; type II CRISPR RNA-guided endonuclease Cas9; Nme2Cas9 polypeptide sequence
MAAFKPNPINYILGLDIGIASVGWAMVEIDEEENPIRLIDLGVRVFERAEVPKTGDSLAMARRLARSVRRLTRRRAHRLLRARRLLKREGVLQAADFDENGLIKSLPNTPWQLRAAALDRKLTPLEWSAVLLHLIKHRGYLSQRKNEGETADKELGALLKGVANNAHALQTGDFRTPAELALNKFEKESGHIRNQRGDYSHTFSRKDLQAELILLFEKQKEFGNPHVSGGLKEGIETLLMTQRPALSGDAVQKMLGHCTFEPAEPKAAKNTYTAERFIWLTKLNNLRILEQGSERPLTDTERATLMDEPYRKSKLTYAQARKLLGLEDTAFFKGLRYGKDNAEASTLMEMKAYHAISRALEKEGLKDKKSPLNLSSELQDEIGTAFSLFKTDEDITGRLKDRVQPEILEALLKHISFDKFVQISLKALRRIVPLMEQGKRYDEACAEIYGDHYGKKNTEEKIYLPPIPADEIRNPVVLRALSQARKVINGVVRRYGSPARIHIETAREVGKSFKDRKEIEKRQEENRKDREKAAAKFREYFPNFVGEPKSKDILKLRLYEQQHGKCLYSGKEINLVRLNEKGYVEIDHALPFSRTWDDSFNNKVLVLGSENQNKGNQTPYEYFNGKDNSREWQEFKARVETSRFPRSKKQRILLQKFDEDGFKECNLNDTRYVNRFLCQFVADHILLTGKGKRRVFASNGQITNLLRGFWGLRKVRAENDRHHALDAVVVACSTVAMQQKITRFVRYKEMNAFDGKTIDKETGKVLHQKTHFPQPWEFFAQEVMIRVFGKPDGKPEFEEADTPEKLRTLLAEKLSSRPEAVHEYVTPLFVSRAPNRKMSGAHKDTLRSAKRFVKHNEKISVKRVWLTEIKLADLENMVNYKNGREIELYEALKARLEAYGGNAKQAFDPKDNPFYKKGGQLVKAVRVEKTQESGVLLNKKNAYTIADNGDMVRVDVFCKVDKKGKNQYFIVPIYAWQVAENILPDIDCKGYRIDDSYTFCFSLHKYDLIAFQKDEKSKVEFAYYINCDSSNGRFYLAWHDKGSKEQQFRISTQNLVLIQKYQVNELGKEIRPCRLKKRPPVR

SEQ ID NO: 210 - protein, 1300 aa, Francisella tularensis
  REGION 1..1300: note = MISC_FEATURE - wild type Cpf1 polypeptide sequence
  source 1..1300: note = subspecies novicida
MSIYQEFVNKYSLSKTLRFELIPQGKTLENIKARGLILDDEKRAKDYKKAKQIIDKYHQFFIEEILSSVCISEDLLQNYSDVYFKLKKSDDDNLQKDFKSAKDTIKKQISEYIKDSEKFKNLFNQNLIDAKKGQESDLILWLKQSKDNGIELFKANSDITDIDEALEIIKSFKGWTTYFKGFHENRKNVYSSNDIPTSIIYRIVDDNLPKFLENKAKYESLKDKAPEAINYEQIKKDLAEELTFDIDYKTSEVNQRVFSLDEVFEIANFNNYLNQSGITKFNTIIGGKFVNGENTKRKGINEYINLYSQQINDKTLKKYKMSVLFKQILSDTESKSFVIDKLEDDSDVVTTMQSFYEQIAAFKTVEEKSIKETLSLLFDDLKAQKLDLSKIYFKNDKSLTDLSQQVFDDYSVIGTAVLEYITQQIAPKNLDNPSKKEQELIAKKTEKAKYLSLETIKLALEEFNKHRDIDKQCRFEEILANFAAIPMIFDEIAQNKDNLAQISIKYQNQGKKDLLQASAEDDVKAIKDLLDQTNNLLHKLKIFHISQSEDKANILDKDEHFYLVFEECYFELANIVPLYNKIRNYITQKPYSDEKFKLNFENSTLANGWDKNKEPDNTAILFIKDDKYYLGVMNKKNNKIFDDKAIKENKGEGYKKIVYKLLPGANKMLPKVFFSAKSIKFYNPSEDILRIRNHSTHTKNGSPQKGYEKFEFNIEDCRKFIDFYKQSISKHPEWKDFGFRFSDTQRYNSIDEFYREVENQGYKLTFENISESYIDSVVNQGKLYLFQIYNKDFSAYSKGRPNLHTLYWKALFDERNLQDVVYKLNGEAELFYRKQSIPKKITHPAKEAIANKNKDNPKKESVFEYDLIKDKRFTEDKFFFHCPITINFKSSGANKFNDEINLLLKEKANDVHILSIDRGERHLAYYTLVDGKGNIIKQDTFNIIGNDRMKTNYHDKLAAIEKDRDSARKDWKKINNIKEMKEGYLSQVVHEIAKLVIEYNAIVVFEDLNFGFKRGRFKVEKQVYQKLEKMLIEKLNYLVFKDNEFDKTGGVLRAYQLTAPFETFKKMGKQTGIIYYVPAGFTSKICPVTGFVNQLYPKYESVSKSQEFFSKFDKICYNLDKGYFEFSFDYKNFGDKAAKGKWTIASFGSRLINFRNSDKNHNWDTREVYPTKELEKLLKDYSIEYGHGECIKAAICGESDKKFFAKLTSVLNTILQMRNSKTGTELDYLISPVADVNGNFFDSRQAPKNMPQDADANGAYHIGLKGLMLLGRIKNNQEGKKLNLVIKNEEYFEFVQNRNN

SEQ ID NO: 211 - protein, 1300 aa, Francisella tularensis
  REGION 1..1300: note = MISC_FEATURE - Cpf1 D917A polypeptide sequence
  source 1..1300: note = subspecies novicida
MSIYQEFVNKYSLSKTLRFELIPQGKTLENIKARGLILDDEKRAKDYKKAKQIIDKYHQFFIEEILSSVCISEDLLQNYSDVYFKLKKSDDDNLQKDFKSAKDTIKKQISEYIKDSEKFKNLFNQNLIDAKKGQESDLILWLKQSKDNGIELFKANSDITDIDEALEIIKSFKGWTTYFKGFHENRKNVYSSNDIPTSIIYRIVDDNLPKFLENKAKYESLKDKAPEAINYEQIKKDLAEELTFDIDYKTSEVNQRVFSLDEVFEIANFNNYLNQSGITKFNTIIGGKFVNGENTKRKGINEYINLYSQQINDKTLKKYKMSVLFKQILSDTESKSFVIDKLEDDSDVVTTMQSFYEQIAAFKTVEEKSIKETLSLLFDDLKAQKLDLSKIYFKNDKSLTDLSQQVFDDYSVIGTAVLEYITQQIAPKNLDNPSKKEQELIAKKTEKAKYLSLETIKLALEEFNKHRDIDKQCRFEEILANFAAIPMIFDEIAQNKDNLAQISIKYQNQGKKDLLQASAEDDVKAIKDLLDQTNNLLHKLKIFHISQSEDKANILDKDEHFYLVFEECYFELANIVPLYNKIRNYITQKPYSDEKFKLNFENSTLANGWDKNKEPDNTAILFIKDDKYYLGVMNKKNNKIFDDKAIKENKGEGYKKIVYKLLPGANKMLPKVFFSAKSIKFYNPSEDILRIRNHSTHTKNGSPQKGYEKFEFNIEDCRKFIDFYKQSISKHPEWKDFGFRFSDTQRYNSIDEFYREVENQGYKLTFENISESYIDSVVNQGKLYLFQIYNKDFSAYSKGRPNLHTLYWKALFDERNLQDVVYKLNGEAELFYRKQSIPKKITHPAKEAIANKNKDNPKKESVFEYDLIKDKRFTEDKFFFHCPITINFKSSGANKFNDEINLLLKEKANDVHILSIARGERHLAYYTLVDGKGNIIKQDTFNIIGNDRMKTNYHDKLAAIEKDRDSARKDWKKINNIKEMKEGYLSQVVHEIAKLVIEYNAIVVFEDLNFGFKRGRFKVEKQVYQKLEKMLIEKLNYLVFKDNEFDKTGGVLRAYQLTAPFETFKKMGKQTGIIYYVPAGFTSKICPVTGFVNQLYPKYESVSKSQEFFSKFDKICYNLDKGYFEFSFDYKNFGDKAAKGKWTIASFGSRLINFRNSDKNHNWDTREVYPTKELEKLLKDYSIEYGHGECIKAAICGESDKKFFAKLTSVLNTILQMRNSKTGTELDYLISPVADVNGNFFDSRQAPKNMPQDADANGAYHIGLKGLMLLGRIKNNQEGKKLNLVIKNEEYFEFVQNRNN

SEQ ID NO: 212 - protein, 1300 aa, Francisella tularensis
  REGION 1..1300: note = MISC_FEATURE - Cpf1 E1006A polypeptide sequence
  source 1..1300: note = subspecies novicida
MSIYQEFVNKYSLSKTLRFELIPQGKTLENIKARGLILDDEKRAKDYKKAKQIIDKYHQFFIEEILSSVCISEDLLQNYSDVYFKLKKSDDDNLQKDFKSAKDTIKKQISEYIKDSEKFKNLFNQNLIDAKKGQESDLILWLKQSKDNGIELFKANSDITDIDEALEIIKSFKGWTTYFKGFHENRKNVYSSNDIPTSIIYRIVDDNLPKFLENKAKYESLKDKAPEAINYEQIKKDLAEELTFDIDYKTSEVNQRVFSLDEVFEIANFNNYLNQSGITKFNTIIGGKFVNGENTKRKGINEYINLYSQQINDKTLKKYKMSVLFKQILSDTESKSFVIDKLEDDSDVVTTMQSFYEQIAAFKTVEEKSIKETLSLLFDDLKAQKLDLSKIYFKNDKSLTDLSQQVFDDYSVIGTAVLEYITQQIAPKNLDNPSKKEQELIAKKTEKAKYLSLETIKLALEEFNKHRDIDKQCRFEEILANFAAIPMIFDEIAQNKDNLAQISIKYQNQGKKDLLQASAEDDVKAIKDLLDQTNNLLHKLKIFHISQSEDKANILDKDEHFYLVFEECYFELANIVPLYNKIRNYITQKPYSDEKFKLNFENSTLANGWDKNKEPDNTAILFIKDDKYYLGVMNKKNNKIFDDKAIKENKGEGYKKIVYKLLPGANKMLPKVFFSAKSIKFYNPSEDILRIRNHSTHTKNGSPQKGYEKFEFNIEDCRKFIDFYKQSISKHPEWKDFGFRFSDTQRYNSIDEFYREVENQGYKLTFENISESYIDSVVNQGKLYLFQIYNKDFSAYSKGRPNLHTLYWKALFDERNLQDVVYKLNGEAELFYRKQSIPKKITHPAKEAIANKNKDNPKKESVFEYDLIKDKRFTEDKFFFHCPITINFKSSGANKFNDEINLLLKEKANDVHILSIDRGERHLAYYTLVDGKGNIIKQDTFNIIGNDRMKTNYHDKLAAIEKDRDSARKDWKKINNIKEMKEGYLSQVVHEIAKLVIEYNAIVVFADLNFGFKRGRFKVEKQVYQKLEKMLIEKLNYLVFKDNEFDKTGGVLRAYQLTAPFETFKKMGKQTGIIYYVPAGFTSKICPVTGFVNQLYPKYESVSKSQEFFSKFDKICYNLDKGYFEFSFDYKNFGDKAAKGKWTIASFGSRLINFRNSDKNHNWDTREVYPTKELEKLLKDYSIEYGHGECIKAAICGESDKKFFAKLTSVLNTILQMRNSKTGTELDYLISPVADVNGNFFDSRQAPKNMPQDADANGAYHIGLKGLMLLGRIKNNQEGKKLNLVIKNEEYFEFVQNRNN

SEQ ID NO: 213 - protein, 1300 aa, Francisella tularensis
  REGION 1..1300: note = MISC_FEATURE - Cpf1 D1255A polypeptide sequence
  source 1..1300: note = subspecies novicida
MSIYQEFVNKYSLSKTLRFELIPQGKTLENIKARGLILDDEKRAKDYKKAKQIIDKYHQFFIEEILSSVCISEDLLQNYSDVYFKLKKSDDDNLQKDFKSAKDTIKKQISEYIKDSEKFKNLFNQNLIDAKKGQESDLILWLKQSKDNGIELFKANSDITDIDEALEIIKSFKGWTTYFKGFHENRKNVYSSNDIPTSIIYRIVDDNLPKFLENKAKYESLKDKAPEAINYEQIKKDLAEELTFDIDYKTSEVNQRVFSLDEVFEIANFNNYLNQSGITKFNTIIGGKFVNGENTKRKGINEYINLYSQQINDKTLKKYKMSVLFKQILSDTESKSFVIDKLEDDSDVVTTMQSFYEQIAAFKTVEEKSIKETLSLLFDDLKAQKLDLSKIYFKNDKSLTDLSQQVFDDYSVIGTAVLEYITQQIAPKNLDNPSKKEQELIAKKTEKAKYLSLETIKLALEEFNKHRDIDKQCRFEEILANFAAIPMIFDEIAQNKDNLAQISIKYQNQGKKDLLQASAEDDVKAIKDLLDQTNNLLHKLKIFHISQSEDKANILDKDEHFYLVFEECYFELANIVPLYNKIRNYITQKPYSDEKFKLNFENSTLANGWDKNKEPDNTAILFIKDDKYYLGVMNKKNNKIFDDKAIKENKGEGYKKIVYKLLPGANKMLPKVFFSAKSIKFYNPSEDILRIRNHSTHTKNGSPQKGYEKFEFNIEDCRKFIDFYKQSISKHPEWKDFGFRFSDTQRYNSIDEFYREVENQGYKLTFENISESYIDSVVNQGKLYLFQIYNKDFSAYSKGRPNLHTLYWKALFDERNLQDVVYKLNGEAELFYRKQSIPKKITHPAKEAIANKNKDNPKKESVFEYDLIKDKRFTEDKFFFHCPITINFKSSGANKFNDEINLLLKEKANDVHILSIDRGERHLAYYTLVDGKGNIIKQDTFNIIGNDRMKTNYHDKLAAIEKDRDSARKDWKKINNIKEMKEGYLSQVVHEIAKLVIEYNAIVVFEDLNFGFKRGRFKVEKQVYQKLEKMLIEKLNYLVFKDNEFDKTGGVLRAYQLTAPFETFKKMGKQTGIIYYVPAGFTSKICPVTGFVNQLYPKYESVSKSQEFFSKFDKICYNLDKGYFEFSFDYKNFGDKAAKGKWTIASFGSRLINFRNSDKNHNWDTREVYPTKELEKLLKDYSIEYGHGECIKAAICGESDKKFFAKLTSVLNTILQMRNSKTGTELDYLISPVADVNGNFFDSRQAPKNMPQDAAANGAYHIGLKGLMLLGRIKNNQEGKKLNLVIKNEEYFEFVQNRNN

SEQ ID NO: 214 - protein, 1300 aa, Francisella tularensis
  REGION 1..1300: note = MISC_FEATURE - Cpf1 D917A/E1006A polypeptide sequence
  source 1..1300: note = subspecies novicida
MSIYQEFVNKYSLSKTLRFELIPQGKTLENIKARGLILDDEKRAKDYKKAKQIIDKYHQFFIEEILSSVCISEDLLQNYSDVYFKLKKSDDDNLQKDFKSAKDTIKKQISEYIKDSEKFKNLFNQNLIDAKKGQESDLILWLKQSKDNGIELFKANSDITDIDEALEIIKSFKGWTTYFKGFHENRKNVYSSNDIPTSIIYRIVDDNLPKFLENKAKYESLKDKAPEAINYEQIKKDLAEELTFDIDYKTSEVNQRVFSLDEVFEIANFNNYLNQSGITKFNTIIGGKFVNGENTKRKGINEYINLYSQQINDKTLKKYKMSVLFKQILSDTESKSFVIDKLEDDSDVVTTMQSFYEQIAAFKTVEEKSIKETLSLLFDDLKAQKLDLSKIYFKNDKSLTDLSQQVFDDYSVIGTAVLEYITQQIAPKNLDNPSKKEQELIAKKTEKAKYLSLETIKLALEEFNKHRDIDKQCRFEEILANFAAIPMIFDEIAQNKDNLAQISIKYQNQGKKDLLQASAEDDVKAIKDLLDQTNNLLHKLKIFHISQSEDKANILDKDEHFYLVFEECYFELANIVPLYNKIRNYITQKPYSDEKFKLNFENSTLANGWDKNKEPDNTAILFIKDDKYYLGVMNKKNNKIFDDKAIKENKGEGYKKIVYKLLPGANKMLPKVFFSAKSIKFYNPSEDILRIRNHSTHTKNGSPQKGYEKFEFNIEDCRKFIDFYKQSISKHPEWKDFGFRFSDTQRYNSIDEFYREVENQGYKLTFENISESYIDSVVNQGKLYLFQIYNKDFSAYSKGRPNLHTLYWKALFDERNLQDVVYKLNGEAELFYRKQSIPKKITHPAKEAIANKNKDNPKKESVFEYDLIKDKRFTEDKFFFHCPITINFKSSGANKFNDEINLLLKEKANDVHILSIARGERHLAYYTLVDGKGNIIKQDTFNIIGNDRMKTNYHDKLAAIEKDRDSARKDWKKINNIKEMKEGYLSQVVHEIAKLVIEYNAIVVFADLNFGFKRGRFKVEKQVYQKLEKMLIEKLNYLVFKDNEFDKTGGVLRAYQLTAPFETFKKMGKQTGIIYYVPAGFTSKICPVTGFVNQLYPKYESVSKSQEFFSKFDKICYNLDKGYFEFSFDYKNFGDKAAKGKWTIASFGSRLINFRNSDKNHNWDTREVYPTKELEKLLKDYSIEYGHGECIKAAICGESDKKFFAKLTSVLNTILQMRNSKTGTELDYLISPVADVNGNFFDSRQAPKNMPQDADANGAYHIGLKGLMLLGRIKNNQEGKKLNLVIKNEEYFEFVQNRNN

SEQ ID NO: 215 - protein, 1300 aa, Francisella tularensis
  REGION 1..1300: note = MISC_FEATURE - Cpf1 D917A/D1255A polypeptide sequence
  source 1..1300: note = subspecies novicida
MSIYQEFVNKYSLSKTLRFELIPQGKTLENIKARGLILDDEKRAKDYKKAKQIIDKYHQFFIEEILSSVCISEDLLQNYSDVYFKLKKSDDDNLQKDFKSAKDTIKKQISEYIKDSEKFKNLFNQNLIDAKKGQESDLILWLKQSKDNGIELFKANSDITDIDEALEIIKSFKGWTTYFKGFHENRKNVYSSNDIPTSIIYRIVDDNLPKFLENKAKYESLKDKAPEAINYEQIKKDLAEELTFDIDYKTSEVNQRVFSLDEVFEIANFNNYLNQSGITKFNTIIGGKFVNGENTKRKGINEYINLYSQQINDKTLKKYKMSVLFKQILSDTESKSFVIDKLEDDSDVVTTMQSFYEQIAAFKTVEEKSIKETLSLLFDDLKAQKLDLSKIYFKNDKSLTDLSQQVFDDYSVIGTAVLEYITQQIAPKNLDNPSKKEQELIAKKTEKAKYLSLETIKLALEEFNKHRDIDKQCRFEEILANFAAIPMIFDEIAQNKDNLAQISIKYQNQGKKDLLQASAEDDVKAIKDLLDQTNNLLHKLKIFHISQSEDKANILDKDEHFYLVFEECYFELANIVPLYNKIRNYITQKPYSDEKFKLNFENSTLANGWDKNKEPDNTAILFIKDDKYYLGVMNKKNNKIFDDKAIKENKGEGYKKIVYKLLPGANKMLPKVFFSAKSIKFYNPSEDILRIRNHSTHTKNGSPQKGYEKFEFNIEDCRKFIDFYKQSISKHPEWKDFGFRFSDTQRYNSIDEFYREVENQGYKLTFENISESYIDSVVNQGKLYLFQIYNKDFSAYSKGRPNLHTLYWKALFDERNLQDVVYKLNGEAELFYRKQSIPKKITHPAKEAIANKNKDNPKKESVFEYDLIKDKRFTEDKFFFHCPITINFKSSGANKFNDEINLLLKEKANDVHILSIARGERHLAYYTLVDGKGNIIKQDTFNIIGNDRMKTNYHDKLAAIEKDRDSARKDWKKINNIKEMKEGYLSQVVHEIAKLVIEYNAIVVFEDLNFGFKRGRFKVEKQVYQKLEKMLIEKLNYLVFKDNEFDKTGGVLRAYQLTAPFETFKKMGKQTGIIYYVPAGFTSKICPVTGFVNQLYPKYESVSKSQEFFSKFDKICYNLDKGYFEFSFDYKNFGDKAAKGKWTIASFGSRLINFRNSDKNHNWDTREVYPTKELEKLLKDYSIEYGHGECIKAAICGESDKKFFAKLTSVLNTILQMRNSKTGTELDYLISPVADVNGNFFDSRQAPKNMPQDAAANGAYHIGLKGLMLLGRIKNNQEGKKLNLVIKNEEYFEFVQNRNN

SEQ ID NO: 216 - protein, 1300 aa, Francisella tularensis
  REGION 1..1300: note = MISC_FEATURE - Cpf1 E1006A/D1255A polypeptide sequence
  source 1..1300: note = subspecies novicida
MSIYQEFVNKYSLSKTLRFELIPQGKTLENIKARGLILDDEKRAKDYKKAKQIIDKYHQFFIEEILSSVCISEDLLQNYSDVYFKLKKSDDDNLQKDFKSAKDTIKKQISEYIKDSEKFKNLFNQNLIDAKKGQESDLILWLKQSKDNGIELFKANSDITDIDEALEIIKSFKGWTTYFKGFHENRKNVYSSNDIPTSIIYRIVDDNLPKFLENKAKYESLKDKAPEAINYEQIKKDLAEELTFDIDYKTSEVNQRVFSLDEVFEIANFNNYLNQSGITKFNTIIGGKFVNGENTKRKGINEYINLYSQQINDKTLKKYKMSVLFKQILSDTESKSFVIDKLEDDSDVVTTMQSFYEQIAAFKTVEEKSIKETLSLLFDDLKAQKLDLSKIYFKNDKSLTDLSQQVFDDYSVIGTAVLEYITQQIAPKNLDNPSKKEQELIAKKTEKAKYLSLETIKLALEEFNKHRDIDKQCRFEEILANFAAIPMIFDEIAQNKDNLAQISIKYQNQGKKDLLQASAEDDVKAIKDLLDQTNNLLHKLKIFHISQSEDKANILDKDEHFYLVFEECYFELANIVPLYNKIRNYITQKPYSDEKFKLNFENSTLANGWDKNKEPDNTAILFIKDDKYYLGVMNKKNNKIFDDKAIKENKGEGYKKIVYKLLPGANKMLPKVFFSAKSIKFYNPSEDILRIRNHSTHTKNGSPQKGYEKFEFNIEDCRKFIDFYKQSISKHPEWKDFGFRFSDTQRYNSIDEFYREVENQGYKLTFENISESYIDSVVNQGKLYLFQIYNKDFSAYSKGRPNLHTLYWKALFDERNLQDVVYKLNGEAELFYRKQSIPKKITHPAKEAIANKNKDNPKKESVFEYDLIKDKRFTEDKFFFHCPITINFKSSGANKFNDEINLLLKEKANDVHILSIDRGERHLAYYTLVDGKGNIIKQDTFNIIGNDRMKTNYHDKLAAIEKDRDSARKDWKKINNIKEMKEGYLSQVVHEIAKLVIEYNAIVVFADLNFGFKRGRFKVEKQVYQKLEKMLIEKLNYLVFKDNEFDKTGGVLRAYQLTAPFETFKKMGKQTGIIYYVPAGFTSKICPVTGFVNQLYPKYESVSKSQEFFSKFDKICYNLDKGYFEFSFDYKNFGDKAAKGKWTIASFGSRLINFRNSDKNHNWDTREVYPTKELEKLLKDYSIEYGHGECIKAAICGESDKKFFAKLTSVLNTILQMRNSKTGTELDYLISPVADVNGNFFDSRQAPKNMPQDAAANGAYHIGLKGLMLLGRIKNNQEGKKLNLVIKNEEYFEFVQNRNN

SEQ ID NO: 217 - protein, 1300 aa, Francisella tularensis
  REGION 1..1300: note = MISC_FEATURE - Cpf1 D917A/E1006A/D1255A polypeptide sequence
  source 1..1300: note = subspecies novicida
MSIYQEFVNKYSLSKTLRFELIPQGKTLENIKARGLILDDEKRAKDYKKAKQIIDKYHQFFIEEILSSVCISEDLLQNYSDVYFKLKKSDDDNLQKDFKSAKDTIKKQISEYIKDSEKFKNLFNQNLIDAKKGQESDLILWLKQSKDNGIELFKANSDITDIDEALEIIKSFKGWTTYFKGFHENRKNVYSSNDIPTSIIYRIVDDNLPKFLENKAKYESLKDKAPEAINYEQIKKDLAEELTFDIDYKTSEVNQRVFSLDEVFEIANFNNYLNQSGITKFNTIIGGKFVNGENTKRKGINEYINLYSQQINDKTLKKYKMSVLFKQILSDTESKSFVIDKLEDDSDVVTTMQSFYEQIAAFKTVEEKSIKETLSLLFDDLKAQKLDLSKIYFKNDKSLTDLSQQVFDDYSVIGTAVLEYITQQIAPKNLDNPSKKEQELIAKKTEKAKYLSLETIKLALEEFNKHRDIDKQCRFEEILANFAAIPMIFDEIAQNKDNLAQISIKYQNQGKKDLLQASAEDDVKAIKDLLDQTNNLLHKLKIFHISQSEDKANILDKDEHFYLVFEECYFELANIVPLYNKIRNYITQKPYSDEKFKLNFENSTLANGWDKNKEPDNTAILFIKDDKYYLGVMNKKNNKIFDDKAIKENKGEGYKKIVYKLLPGANKMLPKVFFSAKSIKFYNPSEDILRIRNHSTHTKNGSPQKGYEKFEFNIEDCRKFIDFYKQSISKHPEWKDFGFRFSDTQRYNSIDEFYREVENQGYKLTFENISESYIDSVVNQGKLYLFQIYNKDFSAYSKGRPNLHTLYWKALFDERNLQDVVYKLNGEAELFYRKQSIPKKITHPAKEAIANKNKDNPKKESVFEYDLIKDKRFTEDKFFFHCPITINFKSSGANKFNDEINLLLKEKANDVHILSIARGERHLAYYTLVDGKGNIIKQDTFNIIGNDRMKTNYHDKLAAIEKDRDSARKDWKKINNIKEMKEGYLSQVVHEIAKLVIEYNAIVVFADLNFGFKRGRFKVEKQVYQKLEKMLIEKLNYLVFKDNEFDKTGGVLRAYQLTAPFETFKKMGKQTGIIYYVPAGFTSKICPVTGFVNQLYPKYESVSKSQEFFSKFDKICYNLDKGYFEFSFDYKNFGDKAAKGKWTIASFGSRLINFRNSDKNHNWDTREVYPTKELEKLLKDYSIEYGHGECIKAAICGESDKKFFAKLTSVLNTILQMRNSKTGTELDYLISPVADVNGNFFDSRQAPKNMPQDAAANGAYHIGLKGLMLLGRIKNNQEGKKLNLVIKNEEYFEFVQNRNN

SEQ ID NO: 218 - protein, 1052 aa, Staphylococcus aureus
  REGION 1..1052: note = MISC_FEATURE - Exemplary SaCas9 polypeptide sequence
KRNYILGLDIGITSVGYGIIDYETRDVIDAGVRLFKEANVENNEGRRSKRGARRLKRRRRHRIQRVKKLLFDYNLLTDHSELSGINPYEARVKGLSQKLSEEEFSAALLHLAKRRGVHNVNEVEEDTGNELSTKEQISRNSKALEEKYVAELQLERLKKDGEVRGSINRFKTSDYVKEAKQLLKVQKAYHQLDQSFIDTYIDLLETRRTYYEGPGEGSPFGWKDIKEWYEMLMGHCTYFPEELRSVKYAYNADLYNALNDLNNLVITRDENEKLEYYEKFQIIENVFKQKKKPTLKQIAKEILVNEEDIKGYRVTSTGKPEFTNLKVYHDIKDITARKEIIENAELLDQIAKILTIYQSSEDIQEELTNLNSELTQEEIEQISNLKGYTGTHNLSLKAINLILDELWHTNDNQIAIFNRLKLVPKKVDLSQQKEIPTTLVDDFILSPVVKRSFIQSIKVINAIIKKYGLPNDIIIELAREKNSKDAQKMINEMQKRNRQTNERIEEIIRTTGKENAKYLIEKIKLHDMQEGKCLYSLEAIPLEDLLNNPFNYEVDHIIPRSVSFDNSFNNKVLVKQEENSKKGNRTPFQYLSSSDSKISYETFKKHILNLAKGKGRISKTKKEYLLEERDINRFSVQKDFINRNLVDTRYATRGLMNLLRSYFRVNNLDVKVKSINGGFTSFLRRKWKFKKERNKGYKHHAEDALIIANADFIFKEWKKLDKAKKVMENQMFEEKQAESMPEIETEQEYKEIFITPHQIKHIKDFKDYKYSHRVDKKPNRELINDTLYSTRKDDKGNTLIVNNLNGLYDKDNDKLKKLINKSPEKLLMYHHDPQTYQKLKLIMEQYGDEKNPLYKYYEETGNYLTKYSKKDNGPVIKKIKYYGNKLNAHLDITDDYPNSRNKVVKLSLKPYRFDVYLDNGVYKFVTVKNLDVIKKENYYEVNSKCYEEAKKLKKISNQAEFIASFYNNDLIKINGELYRVIGVNNDLLNRIEVNMIDITYREYLENMNDKRPPRIIKTIASKTQSIKKYSTDILGNLYEVKSKKHPQIIKKG

SEQ ID NO: 219 - protein, 1052 aa, Staphylococcus aureus
  REGION 1..1052: note = MISC_FEATURE - SaCas9n polypeptide sequence
KRNYILGLDIGITSVGYGIIDYETRDVIDAGVRLFKEANVENNEGRRSKRGARRLKRRRRHRIQRVKKLLFDYNLLTDHSELSGINPYEARVKGLSQKLSEEEFSAALLHLAKRRGVHNVNEVEEDTGNELSTKEQISRNSKALEEKYVAELQLERLKKDGEVRGSINRFKTSDYVKEAKQLLKVQKAYHQLDQSFIDTYIDLLETRRTYYEGPGEGSPFGWKDIKEWYEMLMGHCTYFPEELRSVKYAYNADLYNALNDLNNLVITRDENEKLEYYEKFQIIENVFKQKKKPTLKQIAKEILVNEEDIKGYRVTSTGKPEFTNLKVYHDIKDITARKEIIENAELLDQIAKILTIYQSSEDIQEELTNLNSELTQEEIEQISNLKGYTGTHNLSLKAINLILDELWHTNDNQIAIFNRLKLVPKKVDLSQQKEIPTTLVDDFILSPVVKRSFIQSIKVINAIIKKYGLPNDIIIELAREKNSKDAQKMINEMQKRNRQTNERIEEIIRTTGKENAKYLIEKIKLHDMQEGKCLYSLEAIPLEDLLNNPFNYEVDHIIPRSVSFDNSFNNKVLVKQEEASKKGNRTPFQYLSSSDSKISYETFKKHILNLAKGKGRISKTKKEYLLEERDINRFSVQKDFINRNLVDTRYATRGLMNLLRSYFRVNNLDVKVKSINGGFTSFLRRKWKFKKERNKGYKHHAEDALIIANADFIFKEWKKLDKAKKVMENQMFEEKQAESMPEIETEQEYKEIFITPHQIKHIKDFKDYKYSHRVDKKPNRELINDTLYSTRKDDKGNTLIVNNLNGLYDKDNDKLKKLINKSPEKLLMYHHDPQTYQKLKLIMEQYGDEKNPLYKYYEETGNYLTKYSKKDNGPVIKKIKYYGNKLNAHLDITDDYPNSRNKVVKLSLKPYRFDVYLDNGVYKFVTVKNLDVIKKENYYEVNSKCYEEAKKLKKISNQAEFIASFYNNDLIKINGELYRVIGVNNDLLNRIEVNMIDITYREYLENMNDKRPPRIIKTIASKTQSIKKYSTDILGNLYEVKSKKHPQIIKKG

SEQ ID NO: 220 - protein, 1052 aa, Staphylococcus aureus
  REGION 1..1052: note = MISC_FEATURE - SaKKH Cas9 polypeptide sequence
KRNYILGLDIGITSVGYGIIDYETRDVIDAGVRLFKEANVENNEGRRSKRGARRLKRRRRHRIQRVKKLLFDYNLLTDHSELSGINPYEARVKGLSQKLSEEEFSAALLHLAKRRGVHNVNEVEEDTGNELSTKEQISRNSKALEEKYVAELQLERLKKDGEVRGSINRFKTSDYVKEAKQLLKVQKAYHQLDQSFIDTYIDLLETRRTYYEGPGEGSPFGWKDIKEWYEMLMGHCTYFPEELRSVKYAYNADLYNALNDLNNLVITRDENEKLEYYEKFQIIENVFKQKKKPTLKQIAKEILVNEEDIKGYRVTSTGKPEFTNLKVYHDIKDITARKEIIENAELLDQIAKILTIYQSSEDIQEELTNLNSELTQEEIEQISNLKGYTGTHNLSLKAINLILDELWHTNDNQIAIFNRLKLVPKKVDLSQQKEIPTTLVDDFILSPVVKRSFIQSIKVINAIIKKYGLPNDIIIELAREKNSKDAQKMINEMQKRNRQTNERIEEIIRTTGKENAKYLIEKIKLHDMQEGKCLYSLEAIPLEDLLNNPFNYEVDHIIPRSVSFDNSFNNKVLVKQEEASKKGNRTPFQYLSSSDSKISYETFKKHILNLAKGKGRISKTKKEYLLEERDINRFSVQKDFINRNLVDTRYATRGLMNLLRSYFRVNNLDVKVKSINGGFTSFLRRKWKFKKERNKGYKHHAEDALIIANADFIFKEWKKLDKAKKVMENQMFEEKQAESMPEIETEQEYKEIFITPHQIKHIKDFKDYKYSHRVDKKPNRKLINDTLYSTRKDDKGNTLIVNNLNGLYDKDNDKLKKLINKSPEKLLMYHHDPQTYQKLKLIMEQYGDEKNPLYKYYEETGNYLTKYSKKDNGPVIKKIKYYGNKLNAHLDITDDYPNSRNKVVKLSLKPYRFDVYLDNGVYKFVTVKNLDVIKKENYYEVNSKCYEEAKKLKKISNQAEFIASFYKNDLIKINGELYRVIGVNNDLLNRIEVNMIDITYREYLENMNDKRPPHIIKTIASKTQSIKKYSTDILGNLYEVKSKKHPQIIKKG

SEQ ID NO: 221 - protein, 707 aa, synthetic construct
  REGION 1..707: note = Casphi-1 polypeptide sequence
MADTPTLFTQFLRHHLPGQRFRKDILKQAGRILANKGEDATIAFLRGKSEESPPDFQPPVKCPIIACSRPLTEWPIYQASVAIQGYVYGQSLAEFEASDPGCSKDGLLGWFDKTGVCTDYFSVQGLNLIFQNARKRYIGVQTKVTNRNEKRHKKLKRINAKRIAEGLPELTSDEPESALDETGHLIDPPGLNTNIYCYQQVSPKPLALSEVNQLPTAYAGYSTSGDDPIQPMVTKDRLSISKGQPGYIPEHQRALLSQKKHRRMRGYGLKARALLVIVRIQDDWAVIDLRSLLRNAYWRRIVQTKEPSTITKLLKLVTGDPVLDATRMVATFTYKPGIVQVRSAKCLKNKQGSKLFSERYLNETVSVTSIDLGSNNLVAVATYRLVNGNTPELLQRFTLPSHLVKDFERYKQAHDTLEDSIQKTAVASLPQGQQTEIRMWSMYGFREAQERVCQELGLADGSIPWNVMTATSTILTDLFLARGGDPKKCMFTSEPKKKKNSKQVLYKIRDRAWAKMYRTLLSKETREAWNKALWGLKRGSPDYARLSKRKEELARRCVNYTISTAEKRAQCGRTIVALEDLNIGFFHGRGKQEPGWVGLFTRKKENRWLMQALHKAFLELAHHRGYHVIEVNPAYTSQTCPVCRHCDPDNRDQHNREAFHCIGCGFRGNADLDVATHNIAMVAITGESLKRARGSVASKTPQPLAAE

SEQ ID NO: 222 - protein, 757 aa, synthetic construct
  REGION 1..757: note = Casphi-2 polypeptide sequence
MPKPAVESEFSKVLKKHFPGERFRSSYMKRGGKILAAQGEEAVVAYLQGKSEEEPPNFQPPAKCHVVTKSRDFAEWPIMKASEAIQRYIYALSTTERAACKPGKSSESHAAWFAATGVSNHGYSHVQGLNLIFDHTLGRYDGVLKKVQLRNEKARARLESINASRADEGLPEIKAEEEEVATNETGHLLQPPGINPSFYVYQTISPQAYRPRDEIVLPPEYAGYVRDPNAPIPLGVVRNRCDIQKGCPGYIPEWQREAGTAISPKTGKAVTVPGLSPKKNKRMRRYWRSEKEKAQDALLVTVRIGTDWVVIDVRGLLRNARWRTIAPKDISLNALLDLFTGDPVIDVRRNIVTFTYTLDACGTYARKWTLKGKQTKATLDKLTATQTVALVAIDLGQTNPISAGISRVTQENGALQCEPLDRFTLPDDLLKDISAYRIAWDRNEEELRARSVEALPEAQQAEVRALDGVSKETARTQLCADFGLDPKRLPWDKMSSNTTFISEALLSNSVSRDQVFFTPAPKKGAKKKAPVEVMRKDRTWARAYKPRLSVEAQKLKNEALWALKRTSPEYLKLSRRKEELCRRSINYVIEKTRRRTQCQIVIPVIEDLNVRFFHGSGKRLPGWDNFFTAKKENRWFIQGLHKAFSDLRTHRSFYVFEVRPERTSITCPKCGHCEVGNRDGEAFQCLSCGKTCNADLDVATHNLTQVALTGKTMPKREEPRDAQGTAPARKTKKASKSKAPPAEREDQTPAQEPSQTS

SEQ ID NO: 223 - protein, 766 aa, synthetic construct
  REGION 1..766: note = Casphi-3 polypeptide sequence
MEKEITELTKIRREFPNKKFSSTDMKKAGKLLKAEGPDAVRDFLNSCQEIIGDFKPPVKTNIVSISRPFEEWPVSMVGRAIQEYYFSLTKEELESVHPGTSSEDHKSFFNITGLSNYNYTSVQGLNLIFKNAKAIYDGTLVKANNKNKKLEKKFNEINHKRSLEGLPIITPDFEEPFDENGHLNNPPGINRNIYGYQGCAAKVFVPSKHKMVSLPKEYEGYNRDPNLSLAGFRNRLEIPEGEPGHVPWFQRMDIPEGQIGHVNKIQRFNFVHGKNSGKVKFSDKTGRVKRYHHSKYKDATKPYKFLEESKKVSALDSILAIITIGDDWVVFDIRGLYRNVFYRELAQKGLTAVQLLDLFTGDPVIDPKKGVVTFSYKEGVVPVFSQKIVPRFKSRDTLEKLTSQGPVALLSVDLGQNEPVAARVCSLKNINDKITLDNSCRISFLDDYKKQIKDYRDSLDELEIKIRLEAINSLETNQQVEIRDLDVFSADRAKANTVDMFDIDPNLISWDSMSDARVSTQISDLYLKNGGDESRVYFEINNKRIKRSDYNISQLVRPKLSDSTRKNLNDSIWKLKRTSEEYLKLSKRKLELSRAVVNYTIRQSKLLSGINDIVIILEDLDVKKKFNGRGIRDIGWDNFFSSRKENRWFIPAFHKAFSELSSNRGLCVIEVNPAWTSATCPDCGFCSKENRDGINFTCRKCGVSYHADIDVATLNIARVAVLGKPMSGPADRERLGDTKKPRVARSRKTMKRKDISNSTVEAMVTA

SEQ ID NO: 224 - protein, 765 aa, synthetic construct
  REGION 1..765: note = Casphi-4 polypeptide sequence
MYSLEMADLKSEPSLLAKLLRDRFPGKYWLPKYWKLAEKKRLTGGEEAACEYMADKQLDSPPPNFRPPARCVILAKSRPFEDWPVHRVASKAQSFVIGLSEQGFAALRAAPPSTADARRDWLRSHGASEDDLMALEAQLLETIMGNAISLHGGVLKKIDNANVKAAKRLSGRNEARLNKGLQELPPEQEGSAYGADGLLVNPPGLNLNIYCRKSCCPKPVKNTARFVGHYPGYLRDSDSILISGTMDRLTIIEGMPGHIPAWQREQGLVKPGGRRRRLSGSESNMRQKVDPSTGPRRSTRSGTVNRSNQRTGRNGDPLLVEIRMKEDWVLLDARGLLRNLRWRESKRGLSCDHEDLSLSGLLALFSGDPVIDPVRNEVVFLYGEGIIPVRSTKPVGTRQSKKLLERQASMGPLTLISCDLGQTNLIAGRASAISLTHGSLGVRSSVRIELDPEIIKSFERLRKDADRLETEILTAAKETLSDEQRGEVNSHEKDSPQTAKASLCRELGLHPPSLPWGQMGPSTTFIADMLISHGRDDDAFLSHGEFPTLEKRKKFDKRFCLESRPLLSSETRKALNESLWEVKRTSSEYARLSQRKKEMARRAVNFVVEISRRKTGLSNVIVNIEDLNVRIFHGGGKQAPGWDGFFRPKSENRWFIQAIHKAFSDLAAHHGIPVIESDPQRTSMTCPECGHCDSKNRNGVRFLCKGCGASMDADFDAACRNLERVALTGKPMPKPSTSCERLLSATTGKVCSDHSLSHDAIEKAS

SEQ ID NO: 225 - protein, 793 aa, synthetic construct
  REGION 1..793: note = Casphi-5 polypeptide sequence
MSSLPTPLELLKQKHADLFKGLQFSSKDNKMAGKVLKKDGEEAALAFLSERGVSRGELPNFRPPAKTLVVAQSRPFEEFPIYRVSEAIQLYVYSLSVKELETVPSGSSTKKEHQRFFQDSSVPDFGYTSVQGLNKIFGLARGIYLGVITRGENQLQKAKSKHEALNKKRRASGEAETEFDPTPYEYMTPERKLAKPPGVNHSIMCYVDISVDEFDFRNPDGIVLPSEYAGYCREINTAIEKGTVDRLGHLKGGPGYIPGHQRKESTTEGPKINFRKGRIRRSYTALYAKRDSRRVRQGKLALPSYRHHMMRLNSNAESAILAVIFFGKDWVVFDLRGLLRNVRWRNLFVDGSTPSTLLGMFGDPVIDPKRGVVAFCYKEQIVPVVSKSITKMVKAPELLNKLYLKSEDPLVLVAIDLGQTNPVGVGVYRVMNASLDYEVVTRFALESELLREIESYRQRTNAFEAQIRAETFDAMTSEEQEEITRVRAFSASKAKENVCHRFGMPVDAVDWATMGSNTIHIAKWVMRHGDPSLVEVLEYRKDNEIKLDKNGVPKKVKLTDKRIANLTSIRLRFSQETSKHYNDTMWELRRKHPVYQKLSKSKADFSRRVVNSIIRRVNHLVPRARIVFIIEDLKNLGKVFHGSGKRELGWDSYFEPKSENRWFIQVLHKAFSETGKHKGYYIIECWPNWTSCTCPKCSCCDSENRHGEVFRCLACGYTCNTDFGTAPDNLVKIATTGKGLPGPKKRCKGSSKGKNPKIARSSETGVSVTESGAPKVKKSSPTQTSQSSSQSAP

SEQ ID NO: 226 - protein, 441 aa, synthetic construct
  REGION 1..441: note = Casphi-6 polypeptide sequence
MNKIEKEKTPLAKLMNENFAGLRFPFAIIKQAGKKLLKEGELKTIEYMTGKGSIEPLPNFKPPVKCLIVAKRRDLKYFPICKASCEIQSYVYSLNYKDFMDYFSTPMTSQKQHEEFFKKSGLNIEYQNVAGLNLIFNNVKNTYNGVILKVKNRNEKLKKKAIKNNYEFEEIKTFNDDGCLINKPGINNVIYCFQSISPKILKNITHLPKEYNDYDCSVDRNIIQKYVSRLDIPESQPGHVPEWQRKLPEFNNTNNPRRRRKWYSNGRNISKGYSVDQVNQAKIEDSLLAQIKIGEDWIILDIRGLLRDLNRRELISYKNKLTIKDVLGFFSDYPIIDIKKNLVTFCYKEGVIQVVSQKSIGNKKSKQLLEKLIENKPIALVSIDLGQTNPVSVKISKLNKINNKISIESFTYRFLNEEILKEIEKYRKDYDKLELKLINEA

SEQ ID NO: 227 - protein, 772 aa, synthetic construct
  REGION 1..772: note = Casphi-7 polypeptide sequence
MSNTAVSTREHMSNKTTPPSPLSLLLRAHFPGLKFESQDYKIAGKKLRDGGPEAVISYLTGKGQAKLKDVKPPAKAFVIAQSRPFIEWDLVRVSRQIQEKIFGIPATKGRPKQDGLSETAFNEAVASLEVDGKSKLNEETRAAFYEVLGLDAPSLHAQAQNALIKSAISIREGVLKKVENRNEKNLSKTKRRKEAGEEATFVEEKAHDERGYLIHPPGVNQTIPGYQAVVIKSCPSDFIGLPSGCLAKESAEALTDYLPHDRMTIPKGQPGYVPEWQHPLLNRRKNRRRRDWYSASLNKPKATCSKRSGTPNRKNSRTDQIQSGRFKGAIPVLMRFQDEWVIIDIRGLLRNARYRKLLKEKSTIPDLLSLFTGDPSIDMRQGVCTFIYKAGQACSAKMVKTKNAPEILSELTKSGPVVLVSIDLGQTNPIAAKVSRVTQLSDGQLSHETLLRELLSNDSSDGKEIARYRVASDRLRDKLANLAVERLSPEHKSEILRAKNDTPALCKARVCAALGLNPEMIAWDKMTPYTEFLATAYLEKGGDRKVATLKPKNRPEMLRRDIKFKGTEGVRIEVSPEAAEAYREAQWDLQRTSPEYLRLSTWKQELTKRILNQLRHKAAKSSQCEVVVMAFEDLNIKMMHGNGKWADGGWDAFFIKKRENRWFMQAFHKSLTELGAHKGVPTIEVTPHRTSITCTKCGHCDKANRDGERFACQKCGFVAHADLEIATDNIERVALTGKPMPKPESERSGDAKKSVGARKAAFKPEEDAEAAE

SEQ ID NO: 228 - protein, 717 aa, synthetic construct
  REGION 1..717: note = Casphi-8 polypeptide sequence
MIKPTVSQFLTPGFKLIRNHSRTAGLKLKNEGEEACKKFVRENEIPKDECPNFQGGPAIANIIAKSREFTEWEIYQSSLAIQEVIFTLPKDKLPEPILKEEWRAQWLSEHGLDTVPYKEAAGLNLIIKNAVNTYKGVQVKVDNKNKNNLAKINRKNEIAKLNGEQEISFEEIKAFDDKGYLLQKPSPNKSIYCYQSVSPKPFITSKYHNVNLPEEYIGYYRKSNEPIVSPYQFDRLRIPIGEPGYVPKWQYTFLSKKENKRRKLSKRIKNVSPILGIICIKKDWCVFDMRGLLRTNHWKKYHKPTDSINDLFDYFTGDPVIDTKANVVRFRYKMENGIVNYKPVREKKGKELLENICDQNGSCKLATVDVGQNNPVAIGLFELKKVNGELTKTLISRHPTPIDFCNKITAYRERYDKLESSIKLDAIKQLTSEQKIEVDNYNNNFTPQNTKQIVCSKLNINPNDLPWDKMISGTHFISEKAQVSNKSEIYFTSTDKGKTKDVMKSDYKWFQDYKPKLSKEVRDALSDIEWRLRRESLEFNKLSKSREQDARQLANWISSMCDVIGIENLVKKNNFFGGSGKREPGWDNFYKPKKENRWWINAIHKALTELSQNKGKRVILLPAMRTSITCPKCKYCDSKNRNGEKFNCLKCGIELNADIDVATENLATVAITAQSMPKPTCERSGDAKKPVRARKAKAPEFHDKLAPSYTVVLREAV

SEQ ID NO: 229 - protein, 793 aa, synthetic construct
  REGION 1..793: note = Casphi-9 polypeptide sequence
MRSSREIGDKILMRQPAEKTAFQVFRQEVIGTQKLSGGDAKTAGRLYKQGKMEAAREWLLKGARDDVPPNFQPPAKCLVVAVSHPFEEWDISKTNHDVQAYIYAQPLQAEGHLNGLSEKWEDTSADQHKLWFEKTGVPDRGLPVQAINKIAKAAVNRAFGVVRKVENRNEKRRSRDNRIAEHNRENGLTEVVREAPEVATNADGFLLHPPGIDPSILSYASVSPVPYNSSKHSFVRLPEEYQAYNVEPDAPIPQFVVEDRFAIPPGQPGYVPEWQRLKCSTNKHRRMRQWSNQDYKPKAGRRAKPLEFQAHLTRERAKGALLVVMRIKEDWVVFDVRGLLRNVEWRKVLSEEAREKLTLKGLLDLFTGDPVIDTKRGIVTFLYKAEITKILSKRTVKTKNARDLLLRLTEPGEDGLRREVGLVAVDLGQTHPIAAAIYRIGRTSAGALESTVLHRQGLREDQKEKLKEYRKRHTALDSRLRKEAFETLSVEQQKEIVTVSGSGAQITKDKVCNYLGVDPSTLPWEKMGSYTHFISDDFLRRGGDPNIVHFDRQPKKGKVSKKSQRIKRSDSQWVGRMRPRLSQETAKARMEADWAAQNENEEYKRLARSKQELARWCVNTLLQNTRCITQCDEIVVVIEDLNVKSLHGKGAREPGWDNFFTPKTENRWFIQILHKTFSELPKHRGEHVIEGCPLRTSITCPACSYCDKNSRNGEKFVCVACGATFHADFEVATYNLVRLATTGMPMPKSLERQGGGEKAGGARKARKKAKQVEKIVVQANANVTMNGASLHSP

SEQ ID NO: 230 - protein, 812 aa, synthetic construct
  REGION 1..812: note = Casphi-10 polypeptide sequence
MDMLDTETNYATETPAQQQDYSPKPPKKAQRAPKGFSKKARPEKKPPKPITLFTQKHFSGVRFLKRVIRDASKILKLSESRTITFLEQAIERDGSAPPDVTPPVHNTIMAVTRPFEEWPEVILSKALQKHCYALTKKIKIKTWPKKGPGKKCLAAWSARTKIPLIPGQVQATNGLFDRIGSIYDGVEKKVTNRNANKKLEYDEAIKEGRNPAVPEYETAYNIDGTLINKPGYNPNLYITQSRTPRLITEADRPLVEKILWQMVEKKTQSRNQARRARLEKAAHLQGLPVPKFVPEKVDRSQKIEIRIIDPLDKIEPYMPQDRMAIKASQDGHVPYWQRPFLSKRRNRRVRAGWGKQVSSIQAWLTGALLVIVRLGNEAFLADIRGALRNAQWRKLLKPDATYQSLFNLFTGDPVVNTRTNHLTMAYREGVVNIVKSRSFKGRQTREHLLTLLGQGKTVAGVSFDLGQKHAAGLLAAHFGLGEDGNPVFTPIQACFLPQRYLDSLTNYRNRYDALTLDMRRQSLLALTPAQQQEFADAQRDPGGQAKRACCLKLNLNPDEIRWDLVSGISTMISDLYIERGGDPRDVHQQVETKPKGKRKSEIRILKIRDGKWAYDFRPKIADETRKAQREQLWKLQKASSEFERLSRYKINIARAIANWALQWGRELSGCDIVIPVLEDLNVGSKFFDGKGKWLLGWDNRFTPKKENRWFIKVLHKAVAELAPHRGVPVYEVMPHRTSMTCPACHYCHPTNREGDRFECQSCHVVKNTDRDVAPYNILRVAVEGKTLDRWQAEKKPQAEPDRPMILIDNQES

SEQ ID NO: 231 - protein, 84 aa, synthetic construct
  REGION 1..84: note = synthetic polypeptide sequence
MTNLSDIIEKETGKQLVIQESILMLPEEVEEVIGNKPESDILVHTAYDESTDENVMLLTSDAPEYKPWALVIQDSNGENKIKML

SEQ ID NO: 232 - protein, 1129 aa, Alicyclobacillus acidoterrestris
  REGION 1..1129: note = MISC_FEATURE - Cas12b/C2c1; sp|T0D7A2|C2C1_ALIAG CRISPR-associated endonuclease C2c1 OS = Alicyclobacillus acido-terrestris (strain ATCC 49025 /DSM 3922/ CIP 106132 / NCIMB 13137/GD3B) GN=c2c1 PE=1 SV=1; Cas12b/C2c1 polypeptide sequence
MAVKSIKVKLRLDDMPEIRAGLWKLHKEVNAGVRYYTEWLSLLRQENLYRRSPNGDGEQECDKTAEECKAELLERLRARQVENGHRGPAGSDDELLQLARQLYELLVPQAIGAKGDAQQIARKFLSPLADKDAVGGLGIAKAGNKPRWVRMREAGEPGWEEEKEKAETRKSADRTADVLRALADFGLKPLMRVYTDSEMSSVEWKPLRKGQAVRTWDRDMFQQAIERMMSWESWNQRVGQEYAKLVEQKNRFEQKNFVGQEHLVHLVNQLQQDMKEASPGLESKEQTAHYVTGRALRGSDKVFEKWGKLAPDAPFDLYDAEIKNVQRRNTRRFGSHDLFAKLAEPEYQALWREDASFLTRYAVYNSILRKLNHAKMFATFTLPDATAHPIWTRFDKLGGNLHQYTFLFNEFGERRHAIRFHKLLKVENGVAREVDDVTVPISMSEQLDNLLPRDPNEPIALYFRDYGAEQHFTGEFGGAKIQCRRDQLAHMHRRRGARDVYLNVSVRVQSQSEARGERRPPYAAVFRLVGDNHRAFVHFDKLSDYLAEHPDDGKLGSEGLLSGLRVMSVDLGLRTSASISVFRVARKDELKPNSKGRVPFFFPIKGNDNLVAVHERSQLLKLPGETESKDLRAIREERQRTLRQLRTQLAYLRLLVRCGSEDVGRRERSWAKLIEQPVDAANHMTPDWREAFENELQKLKSLHGICSDKEWMDAVYESVRRVWRHMGKQVRDWRKDVRSGERPKIRGYAKDVVGGNSIEQIEYLERQYKFLKSWSFFGKVSGQVIRAEKGSRFAITLREHIDHAKEDRLKKLADRIIMEALGYVYALDERGKGKWVAKYPPCQLILLEELSEYQFNNDRPPSENNQLMQWSHRGVFQELINQAQVHDLLVGTMYAAFSSRFDARTGAPGIRCRRVPARCTQEHNPEPFPWWLNKFVVEHTLDACPLRADDLIPTGEGEIFVSPFSAEEGDFHQIHADLNAAQNLQQRLWSDFDISQIRLRCDWGEVDGELVLIPRLTGKRTADSYSNKVFYTNTGVTYYERERGKKRRKVFAQEKLSEEEAELLVEADEAREKSVVLMRDPSGIINRGNWTRQKEFWSMVNQRIEGYLVKQIRSRVPLQDSACENTGDI

SEQ ID NO: 233 - protein, 1368 aa, Mus musculus
  REGION 1..1368: note = MISC_FEATURE - high fidelity Cas9 polypeptide sequence
MDKKYSIGLAIGTNSVGWAVITDEYKVPSKKFKVLGNTDRHSIKKNLIGALLFDSGETAEATRLKRTARRRYTRRKNRICYLQEIFSNEMAKVDDSFFHRLEESFLVEEDKKHERHPIFGNIVDEVAYHEKYPTIYHLRKKLVDSTDKADLRLIYLALAHMIKFRGHFLIEGDLNPDNSDVDKLFIQLVQTYNQLFEENPINASGVDAKAILSARLSKSRRLENLIAQLPGEKKNGLFGNLIALSLGLTPNFKSNFDLAEDAKLQLSKDTYDDDLDNLLAQIGDQYADLFLAAKNLSDAILLSDILRVNTEITKAPLSASMIKRYDEHHQDLTLLKALVRQQLPEKYKEIFFDQSKNGYAGYIDGGASQEEFYKFIKPILEKMDGTEELLVKLNREDLLRKQRTFDNGSIPHQIHLGELHAILRRQEDFYPFLKDNREKIEKILTFRIPYYVGPLARGNSRFAWMTRKSEETITPWNFEEVVDKGASAQSFIERMTAFDKNLPNEKVLPKHSLLYEYFTVYNELTKVKYVTEGMRKPAFLSGEQKKAIVDLLFKTNRKVTVKQLKEDYFKKIECFDSVEISGVEDRFNASLGTYHDLLKIIKDKDFLDNEENEDILEDIVLTLTLFEDREMIEERLKTYAHLFDDKVMKQLKRRRYTGWGALSRKLINGIRDKQSGKTILDFLKSDGFANRNFMALIHDDSLTFKEDIQKAQVSGQGDSLHEHIANLAGSPAIKKGILQTVKVVDELVKVMGRHKPENIVIEMARENQTTQKGQKNSRERMKRIEEGIKELGSQILKEHPVENTQLQNEKLYLYYLQNGRDMYVDQELDINRLSDYDVDHIVPQSFLKDDSIDNKVLTRSDKNRGKSDNVPSEEVVKKMKNYWRQLLNAKLITQRKFDNLTKAERGGLSELDKAGFIKRQLVETRAITKHVAQILDSRMNTKYDENDKLIREVKVITLKSKLVSDFRKDFQFYKVREINNYHHAHDAYLNAVVGTALIKKYPKLESEFVYGDYKVYDVRKMIAKSEQEIGKATAKYFFYSNIMNFFKTEITLANGEIRKRPLIETNGETGEIVWDKGRDFATVRKVLSMPQVNIVKKTEVQTGGFSKESILPKRNSDKLIARKKDWDPKKYGGFDSPTVAYSVLVVAKVEKGKSKKLKSVKELLGITIMERSSFEKNPIDFLEAKGYKEVKKDLIIKLPKYSLFELENGRKRMLASAGELQKGNELALPSKYVNFLYLASHYEKLKGSPEDNEQKQLFVEQHKHYLDEIIEQISEFSKRVILADANLDKVLSAYNKHRDKPIREQAENIIHLFTLTNLGAPAAFKYFDTTIDRKRYTSTKEVLDATLIHQSITGLYETRIDLSQLGGD

SEQ ID NO: 234 - protein, 1368 aa, Streptococcus pyogenes
  REGION 1..1368: note = MISC_FEATURE - PAM-binding SpEQR Cas9 polypeptide sequence
MDKKYSIGLAIGTNSVGWAVITDEYKVPSKKFKVLGNTDRHSIKKNLIGALLFDSGETAEATRLKRTARRRYTRRKNRICYLQEIFSNEMAKVDDSFFHRLEESVLVEEDKKHERHPIFGNIVDEVAYHEKYPTIYHLRKKLVDSTDKADLRLIYLALAHMIKFRGHFLIEGDLNPDNSDVDKLFIQLVQTYNQLFEENPINASGVDAKAILSARLSKSRRLENLIAQLPGEKKNGLFGNLIALSLGLTPNFKSNFDLAEDAKLQLSKDTYDDDLDNLLAQIGDQYADLFLAAKNLSDAILLSDILRVNTEITKAPLSASMIKRYDEHHQDLTLLKALVRQQLPEKYKEIFFDQSKNGYAGYIDGGASQEEFYKFIKPILEKMDGTEELLVKLNREDLLRKQRTFDNGSIPHQIHLGELHAILRRQEDFYPFLKDNREKIEKILTFRIPYYVGPLARGNSRFAWMTRKSEETITPWNFEEVVDKGASAQSFIERMTNFDKNLPNEKVLPKHSLLYEYFTVYNELTKVKYVTEGMRKPAFLSGEQKKAIVDLLFKTNRKVTVKQLKEDYFKKIECFDSVEISGVEDRFNASLGTYHDLLKIIKDKDFLDNEENEDILEDIVLTLTLFEDREMIEERLKTYAHLFDDKVMKQLKRRRYTGWGRLSRKLINGIRDKQSGKTILDFLKSDGFANRNFMQLIHDDSLTFKEDIQKAQVSGQGDSLHEHIANLAGSPAIKKGILQTVKVVDELVKVMGRHKPENIVIEMARENQTTQKGQKNSRERMKRIEEGIKELGSQILKEHPVENTQLQNEKLYLYYLQNGRDMYVDQELDINRLSDYDVDHIVPQSFLKDDSIDNKVLTRSDKNRGKSDNVPSEEVVKKMKNYWRQLLNAKLITQRKFDNLTKAERGGLSELDKAGFIKRQLVETRQITKHVAQILDSRMNTKYDENDKLIREVKVITLKSKLVSDFRKDFQFYKVREINNYHHAHDAYLNAVVGTALIKKYPKLESEFVYGDYKVYDVRKMIAKSEQEIGKATAKYFFYSNIMNFFKTEITLANGEIRKRPLIETNGETGEIVWDKGRDFATVRKVLSMPQVNIVKKTEVQTGGFSKESILPKRNSDKLIARKKDWDPKKYGGFESPTVAYSVLVVAKVEKGKSKKLKSVKELLGITIMERSSFEKNPIDFLEAKGYKEVKKDLIIKLPKYSLFELENGRKRMLASAGELQKGNELALPSKYVNFLYLASHYEKLKGSPEDNEQKQLFVEQHKHYLDEIIEQISEFSKRVILADANLDKVLSAYNKHRDKPIREQAENIIHLFTLTNLGAPAAFKYFDTTIDRKQYRSTKEVLDATLIHQSITGLYETRIDLSQLGGD

SEQ ID NO: 235 - protein, 1368 aa, Streptococcus pyogenes
  REGION 1..1368: note = MISC_FEATURE - PAM-binding SpVQR Cas9 polypeptide sequence
MDKKYSIGLAIGTNSVGWAVITDEYKVPSKKFKVLGNTDRHSIKKNLIGALLFDSGETAEATRLKRTARRRYTRRKNRICYLQEIFSNEMAKVDDSFFHRLEESFLVEEDKKHERHPIFGNIVDEVAYHEKYPTIYHLRKKLVDSTDKADLRLIYLALAHMIKFRGHFLIEGDLNPDNSDVDKLFIQLVQTYNQLFEENPINASGVDAKAILSARLSKSRRLENLIAQLPGEKKNGLFGNLIALSLGLTPNFKSNFDLAEDAKLQLSKDTYDDDLDNLLAQIGDQYADLFLAAKNLSDAILLSDILRVNTEITKAPLSASMIKRYDEHHQDLTLLKALVRQQLPEKYKEIFFDQSKNGYAGYIDGGASQEEFYKFIKPILEKMDGTEELLVKLNREDLLRKQRTFDNGSIPHQIHLGELHAILRRQEDFYPFLKDNREKIEKILTFRIPYYVGPLARGNSRFAWMTRKSEETITPWNFEEVVDKGASAQSFIERMTNFDKNLPNEKVLPKHSLLYEYFTVYNELTKVKYVTEGMRKPAFLSGEQKKAIVDLLFKTNRKVTVKQLKEDYFKKIECFDSVEISGVEDRFNASLGTYHDLLKIIKDKDFLDNEENEDILEDIVLTLTLFEDREMIEERLKTYAHLFDDKVMKQLKRRRYTGWGRLSRKLINGIRDKQSGKTILDFLKSDGFANRNFMQLIHDDSLTFKEDIQKAQVSGQGDSLHEHIANLAGSPAIKKGILQTVKVVDELVKVMGRHKPENIVIEMARENQTTQKGQKNSRERMKRIEEGIKELGSQILKEHPVENTQLQNEKLYLYYLQNGRDMYVDQELDINRLSDYDVDHIVPQSFLKDDSIDNKVLTRSDKNRGKSDNVPSEEVVKKMKNYWRQLLNAKLITQRKFDNLTKAERGGLSELDKAGFIKRQLVETRQITKHVAQILDSRMNTKYDENDKLIREVKVITLKSKLVSDFRKDFQFYKVREINNYHHAHDAYLNAVVGTALIKKYPKLESEFVYGDYKVYDVRKMIAKSEQEIGKATAKYFFYSNIMNFFKTEITLANGEIRKRPLIETNGETGEIVWDKGRDFATVRKVLSMPQVNIVKKTEVQTGGFSKESILPKRNSDKLIARKKDWDPKKYGGFVSPTVAYSVLVVAKVEKGKSKKLKSVKELLGITIMERSSFEKNPIDFLEAKGYKEVKKDLIIKLPKYSLFELENGRKRMLASAGELQKGNELALPSKYVNFLYLASHYEKLKGSPEDNEQKQLFVEQHKHYLDEIIEQISEFSKRVILADANLDKVLSAYNKHRDKPIREQAENIIHLFTLTNLGAPAAFKYFDTTIDRKQYRSTKEVLDATLIHQSITGLYETRIDLSQLGGD

SEQ ID NO: 236 - protein, 1368 aa, Streptococcus pyogenes
  REGION 1..1368: note = MISC_FEATURE - SpVQR Cas9 polypeptide sequence
MDKKYSIGLAIGTNSVGWAVITDEYKVPSKKFKVLGNTDRHSIKKNLIGALLFDSGETAEATRLKRTARRRYTRRKNRICYLQEIFSNEMAKVDDSFFHRLEESFLVEEDKKHERHPIFGNIVDEVAYHEKYPTIYHLRKKLVDSTDKADLRLIYLALAHMIKFRGHFLIEGDLNPDNSDVDKLFIQLVQTYNQLFEENPINASGVDAKAILSARLSKSRRLENLIAQLPGEKKNGLFGNLIALSLGLTPNFKSNFDLAEDAKLQLSKDTYDDDLDNLLAQIGDQYADLFLAAKNLSDAILLSDILRVNTEITKAPLSASMIKRYDEHHQDLTLLKALVRQQLPEKYKEIFFDQSKNGYAGYIDGGASQEEFYKFIKPILEKMDGTEELLVKLNREDLLRKQRTFDNGSIPHQIHLGELHAILRRQEDFYPFLKDNREKIEKILTFRIPYYVGPLARGNSRFAWMTRKSEETITPWNFEEVVDKGASAQSFIERMTNFDKNLPNEKVLPKHSLLYEYFTVYNELTKVKYVTEGMRKPAFLSGEQKKAIVDLLFKTNRKVTVKQLKEDYFKKIECFDSVEISGVEDRFNASLGTYHDLLKIIKDKDFLDNEENEDILEDIVLTLTLFEDREMIEERLKTYAHLFDDKVMKQLKRRRYTGWGRLSRKLINGIRDKQSGKTILDFLKSDGFANRNFMQLIHDDSLTFKEDIQKAQVSGQGDSLHEHIANLAGSPAIKKGILQTVKVVDELVKVMGRHKPENIVIEMARENQTTQKGQKNSRERMKRIEEGIKELGSQILKEHPVENTQLQNEKLYLYYLQNGRDMYVDQELDINRLSDYDVDHIVPQSFLKDDSIDNKVLTRSDKNRGKSDNVPSEEVVKKMKNYWRQLLNAKLITQRKFDNLTKAERGGLSELDKAGFIKRQLVETRQITKHVAQILDSRMNTKYDENDKLIREVKVITLKSKLVSDFRKDFQFYKVREINNYHHAHDAYLNAVVGTALIKKYPKLESEFVYGDYKVYDVRKMIAKSEQEIGKATAKYFFYSNIMNFFKTEITLANGEIRKRPLIETNGETGEIVWDKGRDFATVRKVLSMPQVNIVKKTEVQTGGFSKESILPKRNSDKLIARKKDWDPKKYGGFVSPTVAYSVLVVAKVEKGKSKKLKSVKELLGITIMERSSFEKNPIDFLEAKGYKEVKKDLIIKLPKYSLFELENGRKRMLASARELQKGNELALPSKYVNFLYLASHYEKLKGSPEDNEQKQLFVEQHKHYLDEIIEQISEFSKRVILADANLDKVLSAYNKHRDKPIREQAENIIHLFTLTNLGAPAAFKYFDTTIDRKEYRSTKEVLDATLIHQSITGLYETRIDLSQLGGD

SEQ ID NO: 237 - protein, 1359 aa, Streptococcus macacae
  REGION 1..1359: note = MISC_FEATURE - SpyMacCas9 polypeptide sequence
MDKKYSIGLDIGTNSVGWAVITDDYKVPSKKFKVLGNTDRHSIKKNLIGALLFGSGETAEATRLKRTARRRYTRRKNRICYLQEIFSNEMAKVDDSFFHRLEESFLVEEDKKHERHPIFGNIVDEVAYHEKYPTIYHLRKKLADSTDKADLRLIYLALAHMIKFRGHFLIEGDLNPDNSDVDKLFIQLVQIYNQLFEENPINASRVDAKAILSARLSKSRRLENLIAQLPGEKRNGLFGNLIALSLGLTPNFKSNFDLAEDAKLQLSKDTYDDDLDNLLAQIGDQYADLFLAAKNLSDAILLSDILRVNSEITKAPLSASMIKRYDEHHQDLTLLKALVRQQLPEKYKEIFFDQSKNGYAGYIDGGASQEEFYKFIKPILEKMDGTEELLVKLNREDLLRKQRTFDNGSIPHQIHLGELHAILRRQEDFYPFLKDNREKIEKILTFRIPYYVGPLARGNSRFAWMTRKSEETITPWNFEEVVDKGASAQSFIERMTNFDKNLPNEKVLPKHSLLYEYFTVYNELTKVKYVTEGMRKPAFLSGEQKKAIVDLLFKTNRKVTVKQLKEDYFKKIECFDSVEISGVEDRFNASLGAYHDLLKIIKDKDFLDNEENEDILEDIVLTLTLFEDRGMIEERLKTYAHLFDDKVMKQLKRRRYTGWGRLSRKLINGIRDKQSGKTILDFLKSDGFANRNFMQLIHDDSLTFKEDIQKAQVSGQGHSLHEQIANLAGSPAIKKGILQTVKIVDELVKVMGHKPENIVIEMARENQTTQKGQKNSRERMKRIEEGIKELGSQILKEHPVENTQLQNEKLYLYYLQNGRDMYVDQELDINRLSDYDVDHIVPQSFIKDDSIDNKVLTRSDKNRGKSDNVPSEEVVKKMKNYWRQLLNAKLITQRKFDNLTKAERGGLSELDKAGFIKRQLVETRQITKHVAQILDSRMNTKYDENDKLIREVKVITLKSKLVSDFRKDFQFYKVREINNYHHAHDAYLNAVVGTALIKKYPKLESEFVYGDYKVYDVRKMIAKSEQEIGKATAKYFFYSNIMNFFKTEITLANGEIRKRPLIETNGETGEIVWDKGRDFATVRKVLSMPQVNIVKKTEIQTVGQNGGLFDDNPKSPLEVTPSKLVPLKKELNPKKYGGYQKPTTAYPVLLITDTKQLIPISVMNKKQFEQNPVKFLRDRGYQQVGKNDFIKLPKYTLVDIGDGIKRLWASSKEIHKGNQLVVSKKSQILLYHAHHLDSDLSNDYLQNHNQQFDVLFNEIISFSKKCKLGKEHIQKIENVYSNKKNSASIEELAESFIKLLGFTQLGATSPFNFLGVKLNQKQYKGKKDYILPCTEGTLIRQSITGLYETRVDLSKIGED

SEQ ID NO: 238 - protein, 1410 aa, synthetic construct
  REGION 1..1410: note = CP5 polypeptide sequence
  REGION 1..341: note = MISC_FEATURE - Sequence derived from Cas9
  REGION 342..362: note = MISC_FEATURE - Linker sequence
  REGION 363..1388: note = MISC_FEATURE - Sequence derived from Cas9
  REGION 1389..1410: note = MISC_FEATURE - Bipartite nuclear localization sequence
EIGKATAKYFFYSNIMNFFKTEITLANGEIRKRPLIETNGETGEIVWDKGRDFATVRKVLSMPQVNIVKKTEVQTGGFSKESILPKRNSDKLIARKKDWDPKKYGGFMQPTVAYSVLVVAKVEKGKSKKLKSVKELLGITIMERSSFEKNPIDFLEAKGYKEVKKDLIIKLPKYSLFELENGRKRMLASAKFLQKGNELALPSKYVNFLYLASHYEKLKGSPEDNEQKQLFVEQHKHYLDEIIEQISEFSKRVILADANLDKVLSAYNKHRDKPIREQAENIIHLFTLTNLGAPRAFKYFDTTIARKEYRSTKEVLDATLIHQSITGLYETRIDLSQLGGDGGSGGSGGSGGSGGSGGSGGMDKKYSIGLAIGTNSVGWAVITDEYKVPSKKFKVLGNTDRHSIKKNLIGALLFDSGETAEATRLKRTARRRYTRRKNRICYLQEIFSNEMAKVDDSFFHRLEESFLVEEDKKHERHPIFGNIVDEVAYHEKYPTIYHLRKKLVDSTDKADLRLIYLALAHMIKFRGHFLIEGDLNPDNSDVDKLFIQLVQTYNQLFEENPINASGVDAKAILSARLSKSRRLENLIAQLPGEKKNGLFGNLIALSLGLTPNFKSNFDLAEDAKLQLSKDTYDDDLDNLLAQIGDQYADLFLAAKNLSDAILLSDILRVNTEITKAPLSASMIKRYDEHHQDLTLLKALVRQQLPEKYKEIFFDQSKNGYAGYIDGGASQEEFYKFIKPILEKMDGTEELLVKLNREDLLRKQRTFDNGSIPHQIHLGELHAILRRQEDFYPFLKDNREKIEKILTFRIPYYVGPLARGNSRFAWMTRKSEETITPWNFEEVVDKGASAQSFIERMTNFDKNLPNEKVLPKHSLLYEYFTVYNELTKVKYVTEGMRKPAFLSGEQKKAIVDLLFKTNRKVTVKQLKEDYFKKIECFDSVEISGVEDRFNASLGTYHDLLKIIKDKDFLDNEENEDILEDIVLTLTLFEDREMIEERLKTYAHLFDDKVMKQLKRRRYTGWGRLSRKLINGIRDKQSGKTILDFLKSDGFANRNFMQLIHDDSLTFKEDIQKAQVSGQGDSLHEHIANLAGSPAIKKGILQTVKVVDELVKVMGRHKPENIVIEMARENQTTQKGQKNSRERMKRIEEGIKELGSQILKEHPVENTQLQNEKLYLYYLQNGRDMYVDQELDINRLSDYDVDHIVPQSFLKDDSIDNKVLTRSDKNRGKSDNVPSEEVVKKMKNYWRQLLNAKLITQRKFDNLTKAERGGLSELDKAGFIKRQLVETRQITKHVAQILDSRMNTKYDENDKLIREVKVITLKSKLVSDFRKDFQFYKVREINNYHHAHDAYLNAVVGTALIKKYPKLESEFVYGDYKVYDVRKMIAKSEQEGADKRTADGSEFESPKKKRKV

SEQ ID NO: 239 - protein, 1302 aa, synthetic construct
  REGION 1..1302: note = Cas12c1 polypeptide sequence
MQTKKTHLHLISAKASRKYRRTIACLSDTAKKDLERRKQSGAADPAQELSCLKTIKFKLEVPEGSKLPSFDRISQIYNALETIEKGSLSYLLFALILSGFRIFPNSSAAKTFASSSCYKNDQFASQIKEIFGEMVKNFIPSELESILKKGRRKNNKDWTEENIKRVLNSEFGRKNSEGSSALFDSFLSKFSQELFRKFDSWNEVNKKYLEAAELLDSMLASYGPFDSVCKMIGDSDSRNSLPDKSTIAFTNNAEITVDIESSVMPYMAIAALLREYRQSKSKAAPVAYVQSHLTTTNGNGLSWFFKFGLDLIRKAPVSSKQSTSDGSKSLQELFSVPDDKLDGLKFIKEACEALPEASLLCGEKGELLGYQDFRTSFAGHIDSWVANYVNRLFELIELVNQLPESIKLPSILTQKNHNLVASLGLQEAEVSHSLELFEGLVKNVRQTLKKLAGIDISSSPNEQDIKEFYAFSDVLNRLGSIRNQIENAVQTAKKDKIDLESAIEWKEWKKLKKLPKLNGLGGGVPKQQELLDKALESVKQIRHYQRIDFERVIQWAVNEHCLETVPKFLVDAEKKKINKESSTDFAAKENAVRFLLEGIGAAARGKTDSVSKAAYNWFVVNNFLAKKDLNRYFINCQGCIYKPPYSKRRSLAFALRSDNKDTIEVVWEKFETFYKEISKEIEKFNIFSQEFQTFLHLENLRMKLLLRRIQKPIPAEIAFFSLPQEYYDSLPPNVAFLALNQEITPSEYITQFNLYSSFLNGNLILLRRSRSYLRAKFSWVGNSKLIYAAKEARLWKIPNAYWKSDEWKMILDSNVLVFDKAGNVLPAPTLKKVCEREGDLRLFYPLLRQLPHDWCYRNPFVKSVGREKNVIEVNKEGEPKVASALPGSLFRLIGPAPFKSLLDDCFFNPLDKDLRECMLIVDQEISQKVEAQKVEASLESCTYSIAVPIRYHLEEPKVSNQFENVLAIDQGEAGLAYAVFSLKSIGEAETKPIAVGTIRIPSIRRLIHSVSTYRKKKQRLQNFKQNYDSTAFIMRENVTGDVCAKIVGLMKEFNAFPVLEYDVKNLESGSRQLSAVYKAVNSHFLYFKEPGRDALRKQLWYGGDSWTIDGIEIVTRERKEDGKEGVEKIVPLKVFPGRSVSARFTSKTCSCCGRNVFDWLFTEKKAKTNKKFNVNSKGELTTADGVIQLFEADRSKGPKFYARRKERTPLTKPIAKGSYSLEEIERRVRTNLRRAPKSKQSRDTSQSQYFCVYKDCALHFSGMQADENAAINIGRRFLTALRKNRRSDFPSNVKISDRLLDN

SEQ ID NO: 240 - protein, 1218 aa, synthetic construct
  REGION 1..1218: note = Cas12c2 polypeptide sequence
MTKHSIPLHAFRNSGADARKWKGRIALLAKRGKETMRTLQFPLEMSEPEAAAINTTPFAVAYNAIEGTGKGTLFDYWAKLHLAGFRFFPSGGAATIFRQQAVFEDASWNAAFCQQSGKDWPWLVPSKLYERFTKAPREVAKKDGSKKSIEFTQENVANESHVSLVGASITDKTPEDQKEFFLKMAGALAEKFDSWKSANEDRIVAMKVIDEFLKSEGLHLPSLENIAVKCSVETKPDNATVAWHDAPMSGVQNLAIGVFATCASRIDNIYDLNGGKLSKLIQESATTPNVTALSWLFGKGLEYFRTTDIDTIMQDFNIPASAKESIKPLVESAQAIPTMTVLGKKNYAPFRPNFGGKIDSWIANYASRLMLLNDILEQIEPGFELPQALLDNETLMSGIDMTGDELKELIEAVYAWVDAAKQGLATLLGRGGNVDDAVQTFEQFSAMMDTLNGTLNTISARYVRAVEMAGKDEARLEKLIECKFDIPKWCKSVPKLVGISGGLPKVEEEIKVMNAAFKDVRARMFVRFEEIAAYVASKGAGMDVYDALEKRELEQIKKLKSAVPERAHIQAYRAVLHRIGRAVQNCSEKTKQLFSSKVIEMGVFKNPSHLNNFIFNQKGAIYRSPFDRSRHAPYQLHADKLLKNDWLELLAEISATLMASESTEQMEDALRLERTRLQLQLSGLPDWEYPASLAKPDIEVEIQTALKMQLAKDTVTSDVLQRAFNLYSSVLSGLTFKLLRRSFSLKMRFSVADTTQLIYVPKVCDWAIPKQYLQAEGEIGIAARVVTESSPAKMVTEVEMKEPKALGHFMQQAPHDWYFDASLGGTQVAGRIVEKGKEVGKERKLVGYRMRGNSAYKTVLDKSLVGNTELSQCSMIIEIPYTQTVDADFRAQVQAGLPKVSINLPVKETITASNKDEQMLFDRFVAIDLGERGLGYAVFDAKTLELQESGHRPIKAITNLLNRTHHYEQRPNQRQKFQAKFNVNLSELRENTVGDVCHQINRICAYYNAFPVLEYMVPDRLDKQLKSVYESVTNRYIWSSTDAHKSARVQFWLGGETWEHPYLKSAKDKKPLVLSPGRGASGKGTSQTCSCCGRNPFDLIKDMKPRAKIAVVDGKAKLENSELKLFERNLESKDDMLARRHRNERAGMEQPLTPGNYTVDEIKALLRANLRRAPKNRRTKDTTVSEYHCVFSDCGKTMHADENAAVNIGGKFIADIEK

SEQ ID NO: 241 - protein, 1252 aa, Oleiphilus sp.
  REGION 1..1252: note = MISC_FEATURE - OspCas12c polypeptide sequence
MTKLRHRQKKLTHDWAGSKKREVLGSNGKLQNPLLMPVKKGQVTEFRKAFSAYARATKGEMTDGRKNMFTHSFEPFKTKPSLHQCELADKAYQSLHSYLPGSLAHFLLSAHALGFRIFSKSGEATAFQASSKIEAYESKLASELACVDLSIQNLTISTLFNALTTSVRGKGEETSADPLIARFYTLLTGKPLSRDTQGPERDLAEVISRKIASSFGTWKEMTANPLQSLQFFEEELHALDANVSLSPAFDVLIKMNDLQGDLKNRTIVFDPDAPVFEYNAEDPADIIIKLTARYAKEAVIKNQNVGNYVKNAITTTNANGLGWLLNKGLSLLPVSTDDELLEFIGVERSHPSCHALIELIAQLEAPELFEKNVFSDTRSEVQGMIDSAVSNHIARLSSSRNSLSMDSEELERLIKSFQIHTPHCSLFIGAQSLSQQLESLPEALQSGVNSADILLGSTQYMLTNSLVEESIATYQRTLNRINYLSGVAGQINGAIKRKAIDGEKIHLPAAWSELISLPFIGQPVIDVESDLAHLKNQYQTLSNEFDTLISALQKNFDLNFNKALLNRTQHFEAMCRSTKKNALSKPEIVSYRDLLARLTSCLYRGSLVLRRAGIEVLKKHKIFESNSELREHVHERKHFVFVSPLDRKAKKLLRLTDSRPDLLHVIDEILQHDNLENKDRESLWLVRSGYLLAGLPDQLSSSFINLPIITQKGDRRLIDLIQYDQINRDAFVMLVTSAFKSNLSGLQYRANKQSFVVTRTLSPYLGSKLVYVPKDKDWLVPSQMFEGRFADILQSDYMVWKDAGRLCVIDTAKHLSNIKKSVFSSEEVLAFLRELPHRTFIQTEVRGLGVNVDGIAFNNGDIPSLKTFSNCVQVKVSRTNTSLVQTLNRWFEGGKVSPPSIQFERAYYKKDDQIHEDAAKRKIRFQMPATELVHASDDAGWTPSYLLGIDPGEYGMGLSLVSINNGEVLDSGFIHINSLINFASKKSNHQTKVVPRQQYKSPYANYLEQSKDSAAGDIAHILDRLIYKLNALPVFEALSGNSQSAADQVWTKVLSFYTWGDNDAQNSIRKQHWFGASHWDIKGMLRQPPTEKKPKPYIAFPGSQVSSYGNSQRCSCCGRNPIEQLREMAKDTSIKELKIRNSEIQLFDGTIKLFNPDPSTVIERRRHNLGPSRIPVADRTFKNISPSSLEFKELITIVSRSIRHSPEFIAKKRGIGSEYFCAYSDCNSSLNSEANAAANVAQKFQKQLFFEL

SEQ ID NO: 242 - protein, 767 aa, synthetic construct
  REGION 1..767: note = Cas12g1 polypeptide sequence
MAQASSTPAVSPRPRPRYREERTLVRKLLPRPGQSKQEFRENVKKLRKAFLQFNADVSGVCQWAIQFRPRYGKPAEPTETFWKFFLEPETSLPPNDSRSPEFRRLQAFEAAAGINGAAALDDPAFTNELRDSILAVASRPKTKEAQRLFSRLKDYQPAHRMILAKVAAEWIESRYRRAHQNWERNYEEWKKEKQEWEQNHPELTPEIREAFNQIFQQLEVKEKRVRICPAARLLQNKDNCQYAGKNKHSVLCNQFNEFKKNHLQGKAIKFFYKDAEKYLRCGLQSLKPNVQGPFREDWNKYLRYMNLKEETLRGKNGGRLPHCKNLGQECEFNPHTALCKQYQQQLSSRPDLVQHDELYRKWRREYWREPRKPVFRYPSVKRHSIAKIFGENYFQADFKNSVVGLRLDSMPAGQYLEFAFAPWPRNYRPQPGETEISSVHLHFVGTRPRIGFRFRVPHKRSRFDCTQEELDELRSRTFPRKAQDQKFLEAARKRLLETFPGNAEQELRLLAVDLGTDSARAAFFIGKTFQQAFPLKIVKIEKLYEQWPNQKQAGDRRDASSKQPRPGLSRDHVGRHLQKMRAQASEIAQKRQELTGTPAPETTTDQAAKKATLQPFDLRGLTVHTARMIRDWARLNARQIIQLAEENQVDLIVLESLRGFRPPGYENLDQEKKRRVAFFAHGRIRRKVTEKAVERGMRVVTVPYLASSKVCAECRKKQKDNKQWEKNKKRGLFKCEGCGSQAQVDENAARVLGRVFWGEIELPTAIP

SEQ ID NO: 243 - protein, 870 aa, synthetic construct
  REGION 1..870: note = Cas12h1 polypeptide sequence
MKVHEIPRSQLLKIKQYEGSFVEWYRDLQEDRKKFASLLFRWAAFGYAAREDDGATYISPSQALLERRLLLGDAEDVAIKFLDVLFKGGAPSSSCYSLFYEDFALRDKAKYSGAKREFIEGLATMPLDKIIERIRQDEQLSKIPAEEWLILGAEYSPEEIWEQVAPRIVNVDRSLGKQLRERLGIKCRRPHDAGYCKILMEVVARQLRSHNETYHEYLNQTHEMKTKVANNLTNEFDLVCEFAEVLEEKNYGLGWYVLWQGVKQALKEQKKPTKIQIAVDQLRQPKFAGLLTAKWRALKGAYDTWKLKKRLEKRKAFPYMPNWDNDYQIPVGLTGLGVFTLEVKRTEVVVDLKEHGKLFCSHSHYFGDLTAEKHPSRYHLKFRHKLKLRKRDSRVEPTIGPWIEAALREITIQKKPNGVFYLGLPYALSHGIDNFQIAKRFFSAAKPDKEVINGLPSEMVVGAADLNLSNIVAPVKARIGKGLEGPLHALDYGYGELIDGPKILTPDGPRCGELISLKRDIVEIKSAIKEFKACQREGLTMSEETTTWLSEVESPSDSPRCMIQSRIADTSRRLNSFKYQMNKEGYQDLAEALRLLDAMDSYNSLLESYQRMHLSPGEQSPKEAKFDTKRASFRDLLRRRVAHTIVEYFDDCDIVFFEDLDGPSDSDSRNNALVKLLSPRTLLLYIRQALEKRGIGMVEVAKDGTSQNNPISGHVGWRNKQNKSEIYFYEDKELLVMDADEVGAMNILCRGLNHSVCPYSFVTKAPEKKNDEKKEGDYGKRVKRFLKDRYGSSNVRFLVASMGFVTVTTKRPKDALVGKRLYYHGGELVTHDLHNRMKDEIKYLVEKEVLARRVSLSDSTIKSYKSFAHV

SEQ ID NO: 244 - protein, 1093 aa, synthetic construct
  REGION 1..1093: note = Cas12i1 polypeptide sequence
MSNKEKNASETRKAYTTKMIPRSHDRMKLLGNFMDYLMDGTPIFFELWNQFGGGIDRDIISGTANKDKISDDLLLAVNWFKVMPINSKPQGVSPSNLANLFQQYSGSEPDIQAQEYFASNFDTEKHQWKDMRVEYERLLAELQLSRSDMHHDLKLMYKEKCIGLSLSTAHYITSVMFGTGAKNNRQTKHQFYSKVIQLLEESTQINSVEQLASIILKAGDCDSYRKLRIRCSRKGATPSILKIVQDYELGTNHDDEVNVPSLIANLKEKLGRFEYECEWKCMEKIKAFLASKVGPYYLGSYSAMLENALSPIKGMTTKNCKFVLKQIDAKNDIKYENEPFGKIVEGFFDSPYFESDTNVKWVLHPHHIGESNIKTLWEDLNAIHSKYEEDIASLSEDKKEKRIKVYQGDVCQTINTYCEEVGKEAKTPLVQLLRYLYSRKDDIAVDKIIDGITFLSKKHKVEKQKINPVIQKYPSFNFGNNSKLLGKIISPKDKLKHNLKCNRNQVDNYIWIEIKVLNTKTMRWEKHHYALSSTRFLEEVYYPATSENPPDALAARFRTKTNGYEGKPALSAEQIEQIRSAPVGLRKVKKRQMRLEAARQQNLLPRYTWGKDFNINICKRGNNFEVTLATKVKKKKEKNYKVVLGYDANIVRKNTYAAIEAHANGDGVIDYNDLPVKPIESGFVTVESQVRDKSYDQLSYNGVKLLYCKPHVESRRSFLEKYRNGTMKDNRGNNIQIDFMKDFEAIADDETSLYYFNMKYCKLLQSSIRNHSSQAKEYREEIFELLRDGKLSVLKLSSLSNLSFVMFKVAKSLIGTYFGHLLKKPKNSKSDVKAPPITDEDKQKADPEMFALRLALEEKRLNKVKSKKEVIANKIVAKALELRDKYGPVLIKGENISDTTKKGKKSSTNSFLMDWLARGVANKVKEMVMMHQGLEFVEVNPNFTSHQDPFVHKNPENTFRARYSRCTPSELTEKNRKEILSFLSDKPSKRPTNAYYNEGAMAFLATYGLKKNDVLGVSLEKFKQIMANILHQRSEDQLLFPSRGGMFYLATYKLDADATSVNWNGKQFWVCNADLVAAYNVGLVDIQKDFKKK

SEQ ID NO: 245 - protein, 1054 aa, synthetic construct
  REGION 1..1054: note = Cas12i2 polypeptide sequence
MSSAIKSYKSVLRPNERKNQLLKSTIQCLEDGSAFFFKMLQGLFGGITPEIVRFSTEQEKQQQDIALWCAVNWFRPVSQDSLTHTIASDNLVEKFEEYYGGTASDAIKQYFSASIGESYYWNDCRQQYYDLCRELGVEVSDLTHDLEILCREKCLAVATESNQNNSIISVLFGTGEKEDRSVKLRITKKILEAISNLKEIPKNVAPIQEIILNVAKATKETFRQVYAGNLGAPSTLEKFIAKDGQKEFDLKKLQTDLKKVIRGKSKERDWCCQEELRSYVEQNTIQYDLWAWGEMFNKAHTALKIKSTRNYNFAKQRLEQFKEIQSLNNLLVVKKLNDFFDSEFFSGEETYTICVHHLGGKDLSKLYKAWEDDPADPENAIVVLCDDLKNNFKKEPIRNILRYIFTIRQECSAQDILAAAKYNQQLDRYKSQKANPSVLGNQGFTWTNAVILPEKAQRNDRPNSLDLRIWLYLKLRHPDGRWKKHHIPFYDTRFFQEIYAAGNSPVDTCQFRTPRFGYHLPKLTDQTAIRVNKKHVKAAKTEARIRLAIQQGTLPVSNLKITEISATINSKGQVRIPVKFDVGRQKGTLQIGDRFCGYDQNQTASHAYSLWEVVKEGQYHKELGCFVRFISSGDIVSITENRGNQFDQLSYEGLAYPQYADWRKKASKFVSLWQITKKNKKKEIVTVEAKEKFDAICKYQPRLYKFNKEYAYLLRDIVRGKSLVELQQIRQEIFRFIEQDCGVTRLGSLSLSTLETVKAVKGIIYSYFSTALNASKNNPISDEQRKEFDPELFALLEKLELIRTRKKKQKVERIANSLIQTCLENNIKFIRGEGDLSTTNNATKKKANSRSMDWLARGVFNKIRQLAPMHNITLFGCGSLYTSHQDPLVHRNPDKAMKCRWAAIPVKDIGDWVLRKLSQNLRAKNIGTGEYYHQGVKEFLSHYELQDLEEELLKWRSDRKSNIPCWVLQNRLAEKLGNKEAVVYIPVRGGRIYFATHKVATGAVSIVFDQKQVWVCNADHVAAANIALTVKGIGEQSSDEENPDGSRIKLQLTS

SEQ ID NO: 246 - protein, 4 aa, synthetic construct
  REGION 1..4: note = synthetic peptide sequence
GGGS

SEQ ID NO: 247 - protein, 5 aa, synthetic construct
  REGION 1..5: note = synthetic peptide sequence
GGGGS

SEQ ID NO: 248 - protein, 5 aa, synthetic construct
  REGION 1..5: note = synthetic peptide sequence
EAAAK

SEQ ID NO: 249 - protein, 16 aa, synthetic construct
  REGION 1..16: note = synthetic peptide sequence
SGSETPGTSESATPES

SEQ ID NO: 250 - protein, 6 aa, synthetic construct
  REGION 1..6: note = linker peptide sequence
GGSGGS

SEQ ID NO: 251 - protein, 20 aa, synthetic construct
  REGION 1..20: note = synthetic peptide sequence
GSSGSETPGTSESATPESSG

SEQ ID NO: 252 - DNA, 18 bp, synthetic construct
  misc_feature 1..18: note = synthetic oligonucleotide sequence
  source 1..18: mol_type = other DNA
ggaggctctggaggaagc

SEQ ID NO: 253 - DNA, 60 bp, synthetic construct
  misc_feature 1..60: note = synthetic oligonucleotide sequence
  source 1..60: mol_type = other DNA
ggctcttctggatctgaaacacctggcacaagcgagagcgccacccctgagagctctggc

SEQ ID NO: 254 - protein, 1129 aa, Alicyclobacillus acidiphilus
  REGION 1..1129: note = MISC_FEATURE - AacCas12b polypeptide sequence
MAVKSMKVKLRLDNMPEIRAGLWKLHTEVNAGVRYYTEWLSLLRQENLYRRSPNGDGEQECYKTAEECKAELLERLRARQVENGHCGPAGSDDELLQLARQLYELLVPQAIGAKGDAQQIARKFLSPLADKDAVGGLGIAKAGNKPRWVRMREAGEPGWEEEKAKAEARKSTDRTADVLRALADFGLKPLMRVYTDSDMSSVQWKPLRKGQAVRTWDRDMFQQAIERMMSWESWNQRVGEAYAKLVEQKSRFEQKNFVGQEHLVQLVNQLQQDMKEASHGLESKEQTAHYLTGRALRGSDKVFEKWEKLDPDAPFDLYDTEIKNVQRRNTRRFGSHDLFAKLAEPKYQALWREDASFLTRYAVYNSIVRKLNHAKMFATFTLPDATAHPIWTRFDKLGGNLHQYTFLFNEFGEGRHAIRFQKLLTVEDGVAKEVDDVTVPISMSAQLDDLLPRDPHELVALYFQDYGAEQHLAGEFGGAKIQYRRDQLNHLHARRGARDVYLNLSVRVQSQSEARGERRPPYAAVFRLVGDNHRAFVHFDKLSDYLAEHPDDGKLGSEGLLSGLRVMSVDLGLRTSASISVFRVARKDELKPNSEGRVPFCFPIEGNENLVAVHERSQLLKLPGETESKDLRAIREERQRTLRQLRTQLAYLRLLVRCGSEDVGRRERSWAKLIEQPMDANQMTPDWREAFEDELQKLKSLYGICGDREWTEAVYESVRRVWRHMGKQVRDWRKDVRSGERPKIRGYQKDVVGGNSIEQIEYLERQYKFLKSWSFFGKVSGQVIRAEKGSRFAITLREHIDHAKEDRLKKLADRIIMEALGYVYALDDERGKGKWVAKYPPCQLILLEELSEYQFNNDRPPSENNQLMQWSHRGVFQELLNQAQVHDLLVGTMYAAFSSRFDARTGAPGIRCRRVPARCAREQNPEPFPWWLNKFVAEHKLDGCPLRADDLIPTGEGEFFVSPFSAEEGDFHQIHADLNAAQNLQRRLWSDFDISQIRLRCDWGEVDGEPVLIPRTTGKRTADSYGNKVFYTKTGVTYYERERGKKRRKVFAQEELSEEEAELLVEADEAREKSVVLMRDPSGIINRGDWTRQKEFWSMVNQRIEGYLVKQIRSRVRLQESACENTGDI

SEQ ID NO: 255 - protein, 1140 aa, Bacillus hisashii
  REGION 1..1140: note = MISC_FEATURE - BhCas12b polypeptide sequence
MAPKKKRKVGIHGVPAAATRSFILKIEPNEEVKKGLWKTHEVLNHGIAYYMNILKLIRQEAIYEHHEQDPKNPKKVSKAEIQAELWDFVLKMQKCNSFTHEVDKDEVFNILRELYEELVPSSVEKKGEANQLSNKFLYPLVDPNSQSGKGTASSGRKPRWYNLKIAGDPSWEEEKKKWEEDKKKDPLAKILGKLAEYGLIPLFIPYTDSNEPIVKEIKWMEKSRNQSVRRLDKDMFIQALERFLSWESWNLKVKEEYEKVEKEYKTLEERIKEDIQALKALEQYEKERQEQLLRDTLNTNEYRLSKRGLRGWREIIQKWLKMDENEPSEKYLEVFKDYQRKHPREAGDYSVYEFLSKKENHFIWRNHPEYPYLYATFCEIDKKKKDAKQQATFTLADPINHPLWVRFEERSGSNLNKYRILTEQLHTEKLKKKLTVQLDRLIYPTESGGWEEKGKVDIVLLPSRQFYNQIFLDIEEKGKHAFTYKDESIKFPLKGTLGGARVQFDRDHLRRYPHKVESGNVGRIYFNMTVNIEPTESPVSKSLKIHRDDFPKVVNFKPKELTEWIKDSKGKKLKSGIESLEIGLRVMSIDLGQRQAAAASIFEVVDQKPDIEGKLFFPIKGTELYAVHRASFNIKLPGETLVKSREVLRKAREDNLKLMNQKLNFLRNVLHFQQFEDITEREKRVTKWISRQENSDVPLVYQDELIQIRELMYKPYKDWVAFLKQLHKRLEVEIGKEVKHWRKSLSDGRKGLYGISLKNIDEIDRTRKFLLRWSLRPTEPGEVRRLEPGQRFAIDQLNHLNALKEDRLKKMANTIIMHALGYCYDVRKKKWQAKNPACQIILFEDLSNYNPYEERSRFENSKLMKWSRREIPRQVALQGEIYGLQVGEVGAQFSSRFHAKTGSPGIRCSVVTKEKLQDNRFFKNLQREGRLTLDKIAVLKEGDLYPDKGGEKFISLSKDRKCVTTHADINAAQNLQKRFWTRTHGFYKVYCKAYQVDGQTVYIPESKDQKQKIIEEFGEGYFILKDGVYEWVNAGKLKIKKGSSKQSSSELVDSDILKDSFDLASELKGEKLMLYRDPSGNVFPSDKWMAAGVFFGKLERILISKLTNQYSISTIEDDSSKQSMKRPAATKKAGQAKKKK

SEQ ID NO: 256 - protein, 1108 aa, Bacillus thermoamylovorans
  REGION 1..1108: note = MISC_FEATURE - BTCas12b polypeptide sequence
MATRSFILKIEPNEEVKKGLWKTHEVLNHGIAYYMNILKLIRQEAIYEHHEQDPKNPKKVSKAEIQAELWDFVLKMQKCNSFTHEVDKDVVFNILRELYEELVPSSVEKKGEANQLSNKFLYPLVDPNSQSGKGTASSGRKPRWYNLKIAGDPSWEEEKKKWEEDKKKDPLAKILGKLAEYGLIPLFIPFTDSNEPIVKEIKWMEKSRNQSVRRLDKDMFIQALERFLSWESWNLKVKEEYEKVEKEHKTLEERIKEDIQAFKSLEQYEKERQEQLLRDTLNTNEYRLSKRGLRGWREIIQKWLKMDENEPSEKYLEVFKDYQRKHPREAGDYSVYEFLSKKENHFIWRNHPEYPYLYATFCEIDKKKKDAKQQATFTLADPINHPLWVRFEERSGSNLNKYRILTEQLHTEKLKKKLTVQLDRLIYPTESGGWEEKGKVDIVLLPSRQFYNQIFLDIEEKGKHAFTYKDESIKFPLKGTLGGARVQFDRDHLRRYPHKVESGNVGRIYFNMTVNIEPTESPVSKSLKIHRDDFPKFVNFKPKELTEWIKDSKGKKLKSGIESLEIGLRVMSIDLGQRQAAAASIFEVVDQKPDIEGKLFFPIKGTELYAVHRASFNIKLPGETLVKSREVLRKAREDNLKLMNQKLNFLRNVLHFQQFEDITEREKRVTKWISRQENSDVPLVYQDELIQIRELMYKPYKDWVAFLKQLHKRLEVEIGKEVKHWRKSLSDGRKGLYGISLKNIDEIDRTRKFLLRWSLRPTEPGEVRRLEPGQRFAIDQLNHLNALKEDRLKKMANTIIMHALGYCYDVRKKKWQAKNPACQIILFEDLSNYNPYEERSRFENSKLMKWSRREIPRQVALQGEIYGLQVGEVGAQFSSRFHAKTGSPGIRCSVVTKEKLQDNRFFKNLQREGRLTLDKIAVLKEGDLYPDKGGEKFISLSKDRKLVTTHADINAAQNLQKRFWTRTHGFYKVYCKAYQVDGQTVYIPESKDQKQKIIEEFGEGYFILKDGVYEWGNAGKLKIKKGSSKQSSSELVDSDILKDSFDLASELKGEKLMLYRDPSGNVFPSDKWMAAGVFFGKLERILISKLTNQYSISTIEDDSSKQSM

SEQ ID NO: 257 - protein, 1112 aa, Bacillus sp.
  REGION 1..1112: note = MISC_FEATURE - BvCas12b (Bacillus sp. V3-13) polypeptide sequence
MAIRSIKLKMKTNSGTDSIYLRKALWRTHQLINEGIAYYMNLLTLYRQEAIGDKTKEAYQAELINIIRNQQRNNGSSEEHGSDQEILALLRQLYELIIPSSIGESGDANQLGNKFLYPLVDPNSQSGKGTSNAGRKPRWKRLKEEGNPDWELEKKKDEERKAKDPTVKIFDNLNKYGLLPLFPLFTNIQKDIEWLPLGKRQSVRKWDKDMFIQAIERLLSWESWNRRVADEYKQLKEKTESYYKEHLTGGEEWIEKIRKFEKERNMELEKNAFAPNDGYFITSRQIRGWDRVYEKWSKLPESASPEELWKVVAEQQNKMSEGFGDPKVFSFLANRENRDIWRGHSERIYHIAAYNGLQKKLSRTKEQATFTLPDAIEHPLWIRYESPGGTNLNLFKLEEKQKKNYYVTLSKIIWPSEEKWIEKENIEIPLAPSIQFNRQIKLKQHVKGKQEISFSDYSSRISLDGVLGGSRIQFNRKYIKNHKELLGEGDIGPVFFNLVVDVAPLQETRNGRLQSPIGKALKVISSDFSKVIDYKPKELMDWMNTGSASNSFGVASLLEGMRVMSIDMGQRTSASVSIFEVVKELPKDQEQKLFYSINDTELFAIHKRSFLLNLPGEVVTKNNKQQRQERRKKRQFVRSQIRMLANVLRLETKKTPDERKKAIHKLMEIVQSYDSWTASQKEVWEKELNLLTNMAAFNDEIWKESLVELHHRIEPYVGQIVSKWRKGLSEGRKNLAGISMWNIDELEDTRRLLISWSKRSRTPGEANRIETDEPFGSSLLQHIQNVKDDRLKQMANLIIMTALGFKYDKEEKDRYKRWKETYPACQIILFENLNRYLFNLDRSRRENSRLMKWAHRSIPRTVSMQGEMFGLQVGDVRSEYSSRFHAKTGAPGIRCHALTEEDLKAGSNTLKRLIEDGFINESELAYLKKGDIIPSQGGELFVTLSKRYKKDSDNNELTVIHADINAAQNLQKRFWQQNSEVYRVPCQLARMGEDKLYIPKSQTETIKKYFGKGSFVKNNTEQEVYKWEKSEKMKIKTDTTFDLQDLDGFEDISKTIELAQEQQKKYLTMFRDPSGYFFNNETWRPQKEYWSIVNNIIKSCLKKKILSNKVEL

SEQ ID NO: 258 - DNA, 47 bp, synthetic construct
  misc_feature 1..47: note = 5'UTR oligonucleotide sequence
  source 1..47: mol_type = other DNA
gggaaataagagagaaaagaagagtaagaagaaatataagagccacc

SEQ ID NO: 259 - DNA, 101 bp, synthetic construct
  misc_feature 1..101: note = 3'UTR (TriLink standard UTR)polynucleotide sequence
  source 1..101: mol_type = other DNA
gctggagcctcggtggccatgcttcttgccccttgggcctccccccagcccctcctccccttcctgcacccgtacccccgtggtctttgaataaagtctga

SEQ ID NO: 260 - DNA, 3420 bp, Bacillus hisashii
  misc_feature 1..3420: note = bhCas12b (V4) polynucleotide sequence
  source 1..3420: mol_type = genomic DNA
atggccccaaagaagaagcggaaggtcggtatccacggagtcccagcagccgccaccagatccttcatcctgaagatcgagcccaacgaggaagtgaagaaaggcctctggaaaacccacgaggtgctgaaccacggaatcgcctactacatgaatatcctgaagctgatccggcaagaggccatctacgagcaccacgagcaggaccccaagaatcccaagaaggtgtccaaggccgagatccaggccgagctgtgggatttcgtgctgaagatgcagaagtgcaacagcttcacacacgaggtggacaaggacgaggtgttcaacatcctgagagagctgtacgaggaactggtgcccagcagcgtggaaaagaagggcgaagccaaccagctgagcaacaagtttctgtaccctctggtggaccccaacagccagtctggaaagggaacagccagcagcggcagaaagcccagatggtacaacctgaagattgccggcgatccctcctgggaagaagagaagaagaagtgggaagaagataagaaaaaggacccgctggccaagatcctgggcaagctggctgagtacggactgatccctctgttcatcccctacaccgacagcaacgagcccatcgtgaaagaaatcaagtggatggaaaagtcccggaaccagagcgtgcggcggctggataaggacatgttcattcaggccctggaacggttcctgagctgggagagctggaacctgaaagtgaaagaggaatacgagaaggtcgagaaagagtacaagaccctggaagagaggatcaaagaggacatccaggctctgaaggctctggaacagtatgagaaagagcggcaagaacagctgctgcgggacaccctgaacaccaacgagtaccggctgagcaagagaggccttagaggctggcgggaaatcatccagaaatggctgaaaatggacgagaacgagccctccgagaagtacctggaagtgttcaaggactaccagcggaagcaccctagagaggccggcgattacagcgtgtacgagttcctgtccaagaaagagaaccacttcatctggcggaatcaccctgagtacccctacctgtacgccaccttctgcgagatcgacaagaaaaagaaggacgccaagcagcaggccaccttcacactggccgatcctatcaatcaccctctgtgggtccgattcgaggaaagaagcggcagcaacctgaacaagtacagaatcctgaccgagcagctgcacaccgagaagctgaagaaaaagctgacagtgcagctggaccggctgatctaccctacagaatctggcggctgggaagagaagggcaaagtggacattgtgctgctgcccagccggcagttctacaaccagatcttcctggacatcgaggaaaagggcaagcacgccttcacctacaaggatgagagcatcaagttccctctgaagggcacactcggcggagccagagtgcagttcgacagagatcacctgagaagataccctcacaaggtggaaagcggcaacgtgggcagaatctacttcaacatgaccgtgaacatcgagcctacagagtccccagtgtccaagtctctgaagatccaccgggacgacttccccaaggtggtcaacttcaagcccaaagaactgaccgagtggatcaaggacagcaagggcaagaaactgaagtccggcatcgagtccctggaaatcggcctgagagtgatgagcatcgacctgggacagagacaggccgctgccgcctctattttcgaggtggtggatcagaagcccgacatcgaaggcaagctgtttttcccaatcaagggcaccgagctgtatgccgtgcacagagccagcttcaacatcaagctgcccggcgagacactggtcaagagcagagaagtgctgcggaaggccagagaggacaatctgaaactgatgaaccagaagctcaacttcctgcggaacgtgctgcacttccagcagttcgaggacatcaccgagagagagaagcgggtcaccaagtggatcagcagacaagagaacagcgacgtgcccctggtgtaccaggatgagctgatccagatccgcgagctgatgtacaagccttacaaggactgggtcgccttcctgaagcagctccacaagagactggaagtcgagatcggcaaagaagtgaagcactggcggaagtccctgagcgacggaagaaagggcctgtacggcatctccctgaagaacatcgacgagatcgatcggacccggaagttcctgctgagatggtccctgaggcctaccgaacctggcgaagtgcgtagactggaacccggccagagattcgccatcgaccagctgaatcacctgaacgccctgaaagaagatcggctgaagaagatggccaacaccatcatcatgcacgccctgggctactgctacgacgtgcggaagaagaaatggcaggctaagaaccccgcctgccagatcatcctgttcgaggatctgagcaactacaacccctacgaggaaaggtcccgcttcgagaacagcaagctcatgaagtggtccagacgcgagatccccagacaggttgcactgcagggcgagatctatggcctgcaagtgggagaagtgggcgctcagttcagcagcagattccacgccaagacaggcagccctggcatcagatgtagcgtcgtgaccaaagagaagctgcaggacaatcggttcttcaagaatctgcagagagagggcagactgaccctggacaaaatcgccgtgctgaaagagggcgatctgtacccagacaaaggcggcgagaagttcatcagcctgagcaaggatcggaagtgcgtgaccacacacgccgacatcaacgccgctcagaacctgcagaagcggttctggacaagaacccacggcttctacaaggtgtactgcaaggcctaccaggtggacggccagaccgtgtacatccctgagagcaaggaccagaagcagaagatcatcgaagagttcggcgagggctacttcattctgaaggacggggtgtacgaatgggtcaacgccggcaagctgaaaatcaagaagggcagctccaagcagagcagcagcgagctggtggatagcgacatcctgaaagacagcttcgacctggcctccgagctgaaaggcgaaaagctgatgctgtacagggaccccagcggcaatgtgttccccagcgacaaatggatggccgctggcgtgttcttcggaaagctggaacgcatcctgatcagcaagctgaccaaccagtactccatcagcaccatcgaggacgacagcagcaagcagtctatgaaaaggccggcggccacgaaaaaggccggccaggcaaaaaagaaaaag

SEQ ID NO: 261 - protein, 17 aa, synthetic construct
  REGION 1..17: note = synthetic peptide sequence
MAPKKKRKVGIHGVPAA

SEQ ID NO: 262 - DNA, 51 bp, synthetic construct
  misc_feature 1..51: note = synthetic oligonucleotide sequence
  source 1..51: mol_type = other DNA
atggccccaaagaagaagcggaaggtcggtatccacggagtcccagcagcc

SEQ ID NO: 263 - protein, 1554 aa, synthetic construct
  REGION 1..1554: note = 101 Cas9 TadAins 1015 polypeptide sequence
MDKKYSIGLAIGTNSVGWAVITDEYKVPSKKFKVLGNTDRHSIKKNLIGALLFDSGETAEATRLKRTARRRYTRRKNRICYLQEIFSNEMAKVDDSFFHRLEESFLVEEDKKHERHPIFGNIVDEVAYHEKYPTIYHLRKKLVDSTDKADLRLIYLALAHMIKFRGHFLIEGDLNPDNSDVDKLFIQLVQTYNQLFEENPINASGVDAKAILSARLSKSRRLENLIAQLPGEKKNGLFGNLIALSLGLTPNFKSNFDLAEDAKLQLSKDTYDDDLDNLLAQIGDQYADLFLAAKNLSDAILLSDILRVNTEITKAPLSASMIKRYDEHHQDLTLLKALVRQQLPEKYKEIFFDQSKNGYAGYIDGGASQEEFYKFIKPILEKMDGTEELLVKLNREDLLRKQRTFDNGSIPHQIHLGELHAILRRQEDFYPFLKDNREKIEKILTFRIPYYVGPLARGNSRFAWMTRKSEETITPWNFEEVVDKGASAQSFIERMTNFDKNLPNEKVLPKHSLLYEYFTVYNELTKVKYVTEGMRKPAFLSGEQKKAIVDLLFKTNRKVTVKQLKEDYFKKIECFDSVEISGVEDRFNASLGTYHDLLKIIKDKDFLDNEENEDILEDIVLTLTLFEDREMIEERLKTYAHLFDDKVMKQLKRRRYTGWGRLSRKLINGIRDKQSGKTILDFLKSDGFANRNFMQLIHDDSLTFKEDIQKAQVSGQGDSLHEHIANLAGSPAIKKGILQTVKVVDELVKVMGRHKPENIVIEMARENQTTQKGQKNSRERMKRIEEGIKELGSQILKEHPVENTQLQNEKLYLYYLQNGRDMYVDQELDINRLSDYDVDHIVPQSFLKDDSIDNKVLTRSDKNRGKSDNVPSEEVVKKMKNYWRQLLNAKLITQRKFDNLTKAERGGLSELDKAGFIKRQLVETRQITKHVAQILDSRMNTKYDENDKLIREVKVITLKSKLVSDFRKDFQFYKVREINNYHHAHDAYLNAVVGTALIKKYPKLESEFVYGDYKVGSSGSETPGTSESATPESSGSEVEFSHEYWMRHALTLAKRARDEREVPVGAVLVLNNRVIGEGWNRAIGLHDPTAHAEIMALRQGGLVMQNYRLIDATLYVTFEPCVMCAGAMIHSRIGRVVFGVRNAKTGAAGSLMDVLHYPGMNHRVEITEGILADECAALLCYFFRMPRQVFNAQKKAQSSTDYDVRKMIAKSEQEIGKATAKYFFYSNIMNFFKTEITLANGEIRKRPLIETNGETGEIVWDKGRDFATVRKVLSMPQVNIVKKTEVQTGGFSKESILPKRNSDKLIARKKDWDPKKYGGFDSPTVAYSVLVVAKVEKGKSKKLKSVKELLGITIMERSSFEKNPIDFLEAKGYKEVKKDLIIKLPKYSLFELENGRKRMLASAGELQKGNELALPSKYVNFLYLASHYEKLKGSPEDNEQKQLFVEQHKHYLDEIIEQISEFSKRVILADANLDKVLSAYNKHRDKPIREQAENIIHLFTLTNLGAPAAFKYFDTTIDRKRYTSTKEVLDATLIHQSITGLYETRIDLSQLGGD

SEQ ID NO: 264 - protein, 1554 aa, synthetic construct
  REGION 1..1554: note = 102 Cas9 TadAins 1022 polypeptide sequence
MDKKYSIGLAIGTNSVGWAVITDEYKVPSKKFKVLGNTDRHSIKKNLIGALLFDSGETAEATRLKRTARRRYTRRKNRICYLQEIFSNEMAKVDDSFFHRLEESFLVEEDKKHERHPIFGNIVDEVAYHEKYPTIYHLRKKLVDSTDKADLRLIYLALAHMIKFRGHFLIEGDLNPDNSDVDKLFIQLVQTYNQLFEENPINASGVDAKAILSARLSKSRRLENLIAQLPGEKKNGLFGNLIALSLGLTPNFKSNFDLAEDAKLQLSKDTYDDDLDNLLAQIGDQYADLFLAAKNLSDAILLSDILRVNTEITKAPLSASMIKRYDEHHQDLTLLKALVRQQLPEKYKEIFFDQSKNGYAGYIDGGASQEEFYKFIKPILEKMDGTEELLVKLNREDLLRKQRTFDNGSIPHQIHLGELHAILRRQEDFYPFLKDNREKIEKILTFRIPYYVGPLARGNSRFAWMTRKSEETITPWNFEEVVDKGASAQSFIERMTNFDKNLPNEKVLPKHSLLYEYFTVYNELTKVKYVTEGMRKPAFLSGEQKKAIVDLLFKTNRKVTVKQLKEDYFKKIECFDSVEISGVEDRFNASLGTYHDLLKIIKDKDFLDNEENEDILEDIVLTLTLFEDREMIEERLKTYAHLFDDKVMKQLKRRRYTGWGRLSRKLINGIRDKQSGKTILDFLKSDGFANRNFMQLIHDDSLTFKEDIQKAQVSGQGDSLHEHIANLAGSPAIKKGILQTVKVVDELVKVMGRHKPENIVIEMARENQTTQKGQKNSRERMKRIEEGIKELGSQILKEHPVENTQLQNEKLYLYYLQNGRDMYVDQELDINRLSDYDVDHIVPQSFLKDDSIDNKVLTRSDKNRGKSDNVPSEEVVKKMKNYWRQLLNAKLITQRKFDNLTKAERGGLSELDKAGFIKRQLVETRQITKHVAQILDSRMNTKYDENDKLIREVKVITLKSKLVSDFRKDFQFYKVREINNYHHAHDAYLNAVVGTALIKKYPKLESEFVYGDYKVYDVRKMIGSSGSETPGTSESATPESSGSEVEFSHEYWMRHALTLAKRARDEREVPVGAVLVLNNRVIGEGWNRAIGLHDPTAHAEIMALRQGGLVMQNYRLIDATLYVTFEPCVMCAGAMIHSRIGRVVFGVRNAKTGAAGSLMDVLHYPGMNHRVEITEGILADECAALLCYFFRMPRQVFNAQKKAQSSTDAKSEQEIGKATAKYFFYSNIMNFFKTEITLANGEIRKRPLIETNGETGEIVWDKGRDFATVRKVLSMPQVNIVKKTEVQTGGFSKESILPKRNSDKLIARKKDWDPKKYGGFDSPTVAYSVLVVAKVEKGKSKKLKSVKELLGITIMERSSFEKNPIDFLEAKGYKEVKKDLIIKLPKYSLFELENGRKRMLASAGELQKGNELALPSKYVNFLYLASHYEKLKGSPEDNEQKQLFVEQHKHYLDEIIEQISEFSKRVILADANLDKVLSAYNKHRDKPIREQAENIIHLFTLTNLGAPAAFKYFDTTIDRKRYTSTKEVLDATLIHQSITGLYETRIDLSQLGGD

SEQ ID NO: 265 - protein, 1554 aa, synthetic construct
  REGION 1..1554: note = 103 Cas9 TadAins 1029 polypeptide sequence
MDKKYSIGLAIGTNSVGWAVITDEYKVPSKKFKVLGNTDRHSIKKNLIGALLFDSGETAEATRLKRTARRRYTRRKNRICYLQEIFSNEMAKVDDSFFHRLEESFLVEEDKKHERHPIFGNIVDEVAYHEKYPTIYHLRKKLVDSTDKADLRLIYLALAHMIKFRGHFLIEGDLNPDNSDVDKLFIQLVQTYNQLFEENPINASGVDAKAILSARLSKSRRLENLIAQLPGEKKNGLFGNLIALSLGLTPNFKSNFDLAEDAKLQLSKDTYDDDLDNLLAQIGDQYADLFLAAKNLSDAILLSDILRVNTEITKAPLSASMIKRYDEHHQDLTLLKALVRQQLPEKYKEIFFDQSKNGYAGYIDGGASQEEFYKFIKPILEKMDGTEELLVKLNREDLLRKQRTFDNGSIPHQIHLGELHAILRRQEDFYPFLKDNREKIEKILTFRIPYYVGPLARGNSRFAWMTRKSEETITPWNFEEVVDKGASAQSFIERMTNFDKNLPNEKVLPKHSLLYEYFTVYNELTKVKYVTEGMRKPAFLSGEQKKAIVDLLFKTNRKVTVKQLKEDYFKKIECFDSVEISGVEDRFNASLGTYHDLLKIIKDKDFLDNEENEDILEDIVLTLTLFEDREMIEERLKTYAHLFDDKVMKQLKRRRYTGWGRLSRKLINGIRDKQSGKTILDFLKSDGFANRNFMQLIHDDSLTFKEDIQKAQVSGQGDSLHEHIANLAGSPAIKKGILQTVKVVDELVKVMGRHKPENIVIEMARENQTTQKGQKNSRERMKRIEEGIKELGSQILKEHPVENTQLQNEKLYLYYLQNGRDMYVDQELDINRLSDYDVDHIVPQSFLKDDSIDNKVLTRSDKNRGKSDNVPSEEVVKKMKNYWRQLLNAKLITQRKFDNLTKAERGGLSELDKAGFIKRQLVETRQITKHVAQILDSRMNTKYDENDKLIREVKVITLKSKLVSDFRKDFQFYKVREINNYHHAHDAYLNAVVGTALIKKYPKLESEFVYGDYKVYDVRKMIAKSEQEIGSSGSETPGTSESATPESSGSEVEFSHEYWMRHALTLAKRARDEREVPVGAVLVLNNRVIGEGWNRAIGLHDPTAHAEIMALRQGGLVMQNYRLIDATLYVTFEPCVMCAGAMIHSRIGRVVFGVRNAKTGAAGSLMDVLHYPGMNHRVEITEGILADECAALLCYFFRMPRQVFNAQKKAQSSTDGKATAKYFFYSNIMNFFKTEITLANGEIRKRPLIETNGETGEIVWDKGRDFATVRKVLSMPQVNIVKKTEVQTGGFSKESILPKRNSDKLIARKKDWDPKKYGGFDSPTVAYSVLVVAKVEKGKSKKLKSVKELLGITIMERSSFEKNPIDFLEAKGYKEVKKDLIIKLPKYSLFELENGRKRMLASAGELQKGNELALPSKYVNFLYLASHYEKLKGSPEDNEQKQLFVEQHKHYLDEIIEQISEFSKRVILADANLDKVLSAYNKHRDKPIREQAENIIHLFTLTNLGAPAAFKYFDTTIDRKRYTSTKEVLDATLIHQSITGLYETRIDLSQLGGD

SEQ ID NO: 266 - protein, 1554 aa, synthetic construct
  REGION 1..1554: note = 103 Cas9 TadAins 1040 polypeptide sequence
MDKKYSIGLAIGTNSVGWAVITDEYKVPSKKFKVLGNTDRHSIKKNLIGALLFDSGETAEATRLKRTARRRYTRRKNRICYLQEIFSNEMAKVDDSFFHRLEESFLVEEDKKHERHPIFGNIVDEVAYHEKYPTIYHLRKKLVDSTDKADLRLIYLALAHMIKFRGHFLIEGDLNPDNSDVDKLFIQLVQTYNQLFEENPINASGVDAKAILSARLSKSRRLENLIAQLPGEKKNGLFGNLIALSLGLTPNFKSNFDLAEDAKLQLSKDTYDDDLDNLLAQIGDQYADLFLAAKNLSDAILLSDILRVNTEITKAPLSASMIKRYDEHHQDLTLLKALVRQQLPEKYKEIFFDQSKNGYAGYIDGGASQEEFYKFIKPILEKMDGTEELLVKLNREDLLRKQRTFDNGSIPHQIHLGELHAILRRQEDFYPFLKDNREKIEKILTFRIPYYVGPLARGNSRFAWMTRKSEETITPWNFEEVVDKGASAQSFIERMTNFDKNLPNEKVLPKHSLLYEYFTVYNELTKVKYVTEGMRKPAFLSGEQKKAIVDLLFKTNRKVTVKQLKEDYFKKIECFDSVEISGVEDRFNASLGTYHDLLKIIKDKDFLDNEENEDILEDIVLTLTLFEDREMIEERLKTYAHLFDDKVMKQLKRRRYTGWGRLSRKLINGIRDKQSGKTILDFLKSDGFANRNFMQLIHDDSLTFKEDIQKAQVSGQGDSLHEHIANLAGSPAIKKGILQTVKVVDELVKVMGRHKPENIVIEMARENQTTQKGQKNSRERMKRIEEGIKELGSQILKEHPVENTQLQNEKLYLYYLQNGRDMYVDQELDINRLSDYDVDHIVPQSFLKDDSIDNKVLTRSDKNRGKSDNVPSEEVVKKMKNYWRQLLNAKLITQRKFDNLTKAERGGLSELDKAGFIKRQLVETRQITKHVAQILDSRMNTKYDENDKLIREVKVITLKSKLVSDFRKDFQFYKVREINNYHHAHDAYLNAVVGTALIKKYPKLESEFVYGDYKVYDVRKMIAKSEQEIGKATAKYFFYSGSSGSETPGTSESATPESSGSEVEFSHEYWMRHALTLAKRARDEREVPVGAVLVLNNRVIGEGWNRAIGLHDPTAHAEIMALRQGGLVMQNYRLIDATLYVTFEPCVMCAGAMIHSRIGRVVFGVRNAKTGAAGSLMDVLHYPGMNHRVEITEGILADECAALLCYFFRMPRQVFNAQKKAQSSTDNIMNFFKTEITLANGEIRKRPLIETNGETGEIVWDKGRDFATVRKVLSMPQVNIVKKTEVQTGGFSKESILPKRNSDKLIARKKDWDPKKYGGFDSPTVAYSVLVVAKVEKGKSKKLKSVKELLGITIMERSSFEKNPIDFLEAKGYKEVKKDLIIKLPKYSLFELENGRKRMLASAGELQKGNELALPSKYVNFLYLASHYEKLKGSPEDNEQKQLFVEQHKHYLDEIIEQISEFSKRVILADANLDKVLSAYNKHRDKPIREQAENIIHLFTLTNLGAPAAFKYFDTTIDRKRYTSTKEVLDATLIHQSITGLYETRIDLSQLGGD

SEQ ID NO: 267 - protein, 1554 aa, synthetic construct
  REGION 1..1554: note = 105 Cas9 TadAins 1068 polypeptide sequence
MDKKYSIGLAIGTNSVGWAVITDEYKVPSKKFKVLGNTDRHSIKKNLIGALLFDSGETAEATRLKRTARRRYTRRKNRICYLQEIFSNEMAKVDDSFFHRLEESFLVEEDKKHERHPIFGNIVDEVAYHEKYPTIYHLRKKLVDSTDKADLRLIYLALAHMIKFRGHFLIEGDLNPDNSDVDKLFIQLVQTYNQLFEENPINASGVDAKAILSARLSKSRRLENLIAQLPGEKKNGLFGNLIALSLGLTPNFKSNFDLAEDAKLQLSKDTYDDDLDNLLAQIGDQYADLFLAAKNLSDAILLSDILRVNTEITKAPLSASMIKRYDEHHQDLTLLKALVRQQLPEKYKEIFFDQSKNGYAGYIDGGASQEEFYKFIKPILEKMDGTEELLVKLNREDLLRKQRTFDNGSIPHQIHLGELHAILRRQEDFYPFLKDNREKIEKILTFRIPYYVGPLARGNSRFAWMTRKSEETITPWNFEEVVDKGASAQSFIERMTNFDKNLPNEKVLPKHSLLYEYFTVYNELTKVKYVTEGMRKPAFLSGEQKKAIVDLLFKTNRKVTVKQLKEDYFKKIECFDSVEISGVEDRFNASLGTYHDLLKIIKDKDFLDNEENEDILEDIVLTLTLFEDREMIEERLKTYAHLFDDKVMKQLKRRRYTGWGRLSRKLINGIRDKQSGKTILDFLKSDGFANRNFMQLIHDDSLTFKEDIQKAQVSGQGDSLHEHIANLAGSPAIKKGILQTVKVVDELVKVMGRHKPENIVIEMARENQTTQKGQKNSRERMKRIEEGIKELGSQILKEHPVENTQLQNEKLYLYYLQNGRDMYVDQELDINRLSDYDVDHIVPQSFLKDDSIDNKVLTRSDKNRGKSDNVPSEEVVKKMKNYWRQLLNAKLITQRKFDNLTKAERGGLSELDKAGFIKRQLVETRQITKHVAQILDSRMNTKYDENDKLIREVKVITLKSKLVSDFRKDFQFYKVREINNYHHAHDAYLNAVVGTALIKKYPKLESEFVYGDYKVYDVRKMIAKSEQEIGKATAKYFFYSNIMNFFKTEITLANGEIRKRPLIETNGEGSSGSETPGTSESATPESSGSEVEFSHEYWMRHALTLAKRARDEREVPVGAVLVLNNRVIGEGWNRAIGLHDPTAHAEIMALRQGGLVMQNYRLIDATLYVTFEPCVMCAGAMIHSRIGRVVFGVRNAKTGAAGSLMDVLHYPGMNHRVEITEGILADECAALLCYFFRMPRQVFNAQKKAQSSTDTGEIVWDKGRDFATVRKVLSMPQVNIVKKTEVQTGGFSKESILPKRNSDKLIARKKDWDPKKYGGFDSPTVAYSVLVVAKVEKGKSKKLKSVKELLGITIMERSSFEKNPIDFLEAKGYKEVKKDLIIKLPKYSLFELENGRKRMLASAGELQKGNELALPSKYVNFLYLASHYEKLKGSPEDNEQKQLFVEQHKHYLDEIIEQISEFSKRVILADANLDKVLSAYNKHRDKPIREQAENIIHLFTLTNLGAPAAFKYFDTTIDRKRYTSTKEVLDATLIHQSITGLYETRIDLSQLGGD

SEQ ID NO: 268 - protein, 1554 aa, synthetic construct
  REGION 1..1554: note = 106 Cas9 TadAins 1247 polypeptide sequence
MDKKYSIGLAIGTNSVGWAVITDEYKVPSKKFKVLGNTDRHSIKKNLIGALLFDSGETAEATRLKRTARRRYTRRKNRICYLQEIFSNEMAKVDDSFFHRLEESFLVEEDKKHERHPIFGNIVDEVAYHEKYPTIYHLRKKLVDSTDKADLRLIYLALAHMIKFRGHFLIEGDLNPDNSDVDKLFIQLVQTYNQLFEENPINASGVDAKAILSARLSKSRRLENLIAQLPGEKKNGLFGNLIALSLGLTPNFKSNFDLAEDAKLQLSKDTYDDDLDNLLAQIGDQYADLFLAAKNLSDAILLSDILRVNTEITKAPLSASMIKRYDEHHQDLTLLKALVRQQLPEKYKEIFFDQSKNGYAGYIDGGASQEEFYKFIKPILEKMDGTEELLVKLNREDLLRKQRTFDNGSIPHQIHLGELHAILRRQEDFYPFLKDNREKIEKILTFRIPYYVGPLARGNSRFAWMTRKSEETITPWNFEEVVDKGASAQSFIERMTNFDKNLPNEKVLPKHSLLYEYFTVYNELTKVKYVTEGMRKPAFLSGEQKKAIVDLLFKTNRKVTVKQLKEDYFKKIECFDSVEISGVEDRFNASLGTYHDLLKIIKDKDFLDNEENEDILEDIVLTLTLFEDREMIEERLKTYAHLFDDKVMKQLKRRRYTGWGRLSRKLINGIRDKQSGKTILDFLKSDGFANRNFMQLIHDDSLTFKEDIQKAQVSGQGDSLHEHIANLAGSPAIKKGILQTVKVVDELVKVMGRHKPENIVIEMARENQTTQKGQKNSRERMKRIEEGIKELGSQILKEHPVENTQLQNEKLYLYYLQNGRDMYVDQELDINRLSDYDVDHIVPQSFLKDDSIDNKVLTRSDKNRGKSDNVPSEEVVKKMKNYWRQLLNAKLITQRKFDNLTKAERGGLSELDKAGFIKRQLVETRQITKHVAQILDSRMNTKYDENDKLIREVKVITLKSKLVSDFRKDFQFYKVREINNYHHAHDAYLNAVVGTALIKKYPKLESEFVYGDYKVYDVRKMIAKSEQEIGKATAKYFFYSNIMNFFKTEITLANGEIRKRPLIETNGETGEIVWDKGRDFATVRKVLSMPQVNIVKKTEVQTGGFSKESILPKRNSDKLIARKKDWDPKKYGGFDSPTVAYSVLVVAKVEKGKSKKLKSVKELLGITIMERSSFEKNPIDFLEAKGYKEVKKDLIIKLPKYSLFELENGRKRMLASAGELQKGNELALPSKYVNFLYLASHYEKLKGGSSGSETPGTSESATPESSGSEVEFSHEYWMRHALTLAKRARDEREVPVGAVLVLNNRVIGEGWNRAIGLHDPTAHAEIMALRQGGLVMQNYRLIDATLYVTFEPCVMCAGAMIHSRIGRVVFGVRNAKTGAAGSLMDVLHYPGMNHRVEITEGILADECAALLCYFFRMPRQVFNAQKKAQSSTDSPEDNEQKQLFVEQHKHYLDEIIEQISEFSKRVILADANLDKVLSAYNKHRDKPIREQAENIIHLFTLTNLGAPAAFKYFDTTIDRKRYTSTKEVLDATLIHQSITGLYETRIDLSQLGGD

SEQ ID NO: 269 - protein, 1554 aa, synthetic construct
  REGION 1..1554: note = 107 Cas9 TadAins 1054 polypeptide sequence
MDKKYSIGLAIGTNSVGWAVITDEYKVPSKKFKVLGNTDRHSIKKNLIGALLFDSGETAEATRLKRTARRRYTRRKNRICYLQEIFSNEMAKVDDSFFHRLEESFLVEEDKKHERHPIFGNIVDEVAYHEKYPTIYHLRKKLVDSTDKADLRLIYLALAHMIKFRGHFLIEGDLNPDNSDVDKLFIQLVQTYNQLFEENPINASGVDAKAILSARLSKSRRLENLIAQLPGEKKNGLFGNLIALSLGLTPNFKSNFDLAEDAKLQLSKDTYDDDLDNLLAQIGDQYADLFLAAKNLSDAILLSDILRVNTEITKAPLSASMIKRYDEHHQDLTLLKALVRQQLPEKYKEIFFDQSKNGYAGYIDGGASQEEFYKFIKPILEKMDGTEELLVKLNREDLLRKQRTFDNGSIPHQIHLGELHAILRRQEDFYPFLKDNREKIEKILTFRIPYYVGPLARGNSRFAWMTRKSEETITPWNFEEVVDKGASAQSFIERMTNFDKNLPNEKVLPKHSLLYEYFTVYNELTKVKYVTEGMRKPAFLSGEQKKAIVDLLFKTNRKVTVKQLKEDYFKKIECFDSVEISGVEDRFNASLGTYHDLLKIIKDKDFLDNEENEDILEDIVLTLTLFEDREMIEERLKTYAHLFDDKVMKQLKRRRYTGWGRLSRKLINGIRDKQSGKTILDFLKSDGFANRNFMQLIHDDSLTFKEDIQKAQVSGQGDSLHEHIANLAGSPAIKKGILQTVKVVDELVKVMGRHKPENIVIEMARENQTTQKGQKNSRERMKRIEEGIKELGSQILKEHPVENTQLQNEKLYLYYLQNGRDMYVDQELDINRLSDYDVDHIVPQSFLKDDSIDNKVLTRSDKNRGKSDNVPSEEVVKKMKNYWRQLLNAKLITQRKFDNLTKAERGGLSELDKAGFIKRQLVETRQITKHVAQILDSRMNTKYDENDKLIREVKVITLKSKLVSDFRKDFQFYKVREINNYHHAHDAYLNAVVGTALIKKYPKLESEFVYGDYKVYDVRKMIAKSEQEIGKATAKYFFYSNIMNFFKTEITLANGSSGSETPGTSESATPESSGSEVEFSHEYWMRHALTLAKRARDEREVPVGAVLVLNNRVIGEGWNRAIGLHDPTAHAEIMALRQGGLVMQNYRLIDATLYVTFEPCVMCAGAMIHSRIGRVVFGVRNAKTGAAGSLMDVLHYPGMNHRVEITEGILADECAALLCYFFRMPRQVFNAQKKAQSSTDGEIRKRPLIETNGETGEIVWDKGRDFATVRKVLSMPQVNIVKKTEVQTGGFSKESILPKRNSDKLIARKKDWDPKKYGGFDSPTVAYSVLVVAKVEKGKSKKLKSVKELLGITIMERSSFEKNPIDFLEAKGYKEVKKDLIIKLPKYSLFELENGRKRMLASAGELQKGNELALPSKYVNFLYLASHYEKLKGSPEDNEQKQLFVEQHKHYLDEIIEQISEFSKRVILADANLDKVLSAYNKHRDKPIREQAENIIHLFTLTNLGAPAAFKYFDTTIDRKRYTSTKEVLDATLIHQSITGLYETRIDLSQLGGD

SEQ ID NO: 270 - protein, 1554 aa, synthetic construct
  REGION 1..1554: note = 108 Cas9 TadAins 1026 polypeptide sequence
MDKKYSIGLAIGTNSVGWAVITDEYKVPSKKFKVLGNTDRHSIKKNLIGALLFDSGETAEATRLKRTARRRYTRRKNRICYLQEIFSNEMAKVDDSFFHRLEESFLVEEDKKHERHPIFGNIVDEVAYHEKYPTIYHLRKKLVDSTDKADLRLIYLALAHMIKFRGHFLIEGDLNPDNSDVDKLFIQLVQTYNQLFEENPINASGVDAKAILSARLSKSRRLENLIAQLPGEKKNGLFGNLIALSLGLTPNFKSNFDLAEDAKLQLSKDTYDDDLDNLLAQIGDQYADLFLAAKNLSDAILLSDILRVNTEITKAPLSASMIKRYDEHHQDLTLLKALVRQQLPEKYKEIFFDQSKNGYAGYIDGGASQEEFYKFIKPILEKMDGTEELLVKLNREDLLRKQRTFDNGSIPHQIHLGELHAILRRQEDFYPFLKDNREKIEKILTFRIPYYVGPLARGNSRFAWMTRKSEETITPWNFEEVVDKGASAQSFIERMTNFDKNLPNEKVLPKHSLLYEYFTVYNELTKVKYVTEGMRKPAFLSGEQKKAIVDLLFKTNRKVTVKQLKEDYFKKIECFDSVEISGVEDRFNASLGTYHDLLKIIKDKDFLDNEENEDILEDIVLTLTLFEDREMIEERLKTYAHLFDDKVMKQLKRRRYTGWGRLSRKLINGIRDKQSGKTILDFLKSDGFANRNFMQLIHDDSLTFKEDIQKAQVSGQGDSLHEHIANLAGSPAIKKGILQTVKVVDELVKVMGRHKPENIVIEMARENQTTQKGQKNSRERMKRIEEGIKELGSQILKEHPVENTQLQNEKLYLYYLQNGRDMYVDQELDINRLSDYDVDHIVPQSFLKDDSIDNKVLTRSDKNRGKSDNVPSEEVVKKMKNYWRQLLNAKLITQRKFDNLTKAERGGLSELDKAGFIKRQLVETRQITKHVAQILDSRMNTKYDENDKLIREVKVITLKSKLVSDFRKDFQFYKVREINNYHHAHDAYLNAVVGTALIKKYPKLESEFVYGDYKVYDVRKMIAKSEGSSGSETPGTSESATPESSGSEVEFSHEYWMRHALTLAKRARDEREVPVGAVLVLNNRVIGEGWNRAIGLHDPTAHAEIMALRQGGLVMQNYRLIDATLYVTFEPCVMCAGAMIHSRIGRVVFGVRNAKTGAAGSLMDVLHYPGMNHRVEITEGILADECAALLCYFFRMPRQVFNAQKKAQSSTDQEIGKATAKYFFYSNIMNFFKTEITLANGEIRKRPLIETNGETGEIVWDKGRDFATVRKVLSMPQVNIVKKTEVQTGGFSKESILPKRNSDKLIARKKDWDPKKYGGFDSPTVAYSVLVVAKVEKGKSKKLKSVKELLGITIMERSSFEKNPIDFLEAKGYKEVKKDLIIKLPKYSLFELENGRKRMLASAGELQKGNELALPSKYVNFLYLASHYEKLKGSPEDNEQKQLFVEQHKHYLDEIIEQISEFSKRVILADANLDKVLSAYNKHRDKPIREQAENIIHLFTLTNLGAPAAFKYFDTTIDRKRYTSTKEVLDATLIHQSITGLYETRIDLSQLGGD

SEQ ID NO: 271 - protein, 1540 aa, synthetic construct
  REGION 1..1540: note = 109 Cas9 TadAins 768 polypeptide sequence
MDKKYSIGLAIGTNSVGWAVITDEYKVPSKKFKVLGNTDRHSIKKNLIGALLFDSGETAEATRLKRTARRRYTRRKNRICYLQEIFSNEMAKVDDSFFHRLEESFLVEEDKKHERHPIFGNIVDEVAYHEKYPTIYHLRKKLVDSTDKADLRLIYLALAHMIKFRGHFLIEGDLNPDNSDVDKLFIQLVQTYNQLFEENPINASGVDAKAILSARLSKSRRLENLIAQLPGEKKNGLFGNLIALSLGLTPNFKSNFDLAEDAKLQLSKDTYDDDLDNLLAQIGDQYADLFLAAKNLSDAILLSDILRVNTEITKAPLSASMIKRYDEHHQDLTLLKALVRQQLPEKYKEIFFDQSKNGYAGYIDGGASQEEFYKFIKPILEKMDGTEELLVKLNREDLLRKQRTFDNGSIPHQIHLGELHAILRRQEDFYPFLKDNREKIEKILTFRIPYYVGPLARGNSRFAWMTRKSEETITPWNFEEVVDKGASAQSFIERMTNFDKNLPNEKVLPKHSLLYEYFTVYNELTKVKYVTEGMRKPAFLSGEQKKAIVDLLFKTNRKVTVKQLKEDYFKKIECFDSVEISGVEDRFNASLGTYHDLLKIIKDKDFLDNEENEDILEDIVLTLTLFEDREMIEERLKTYAHLFDDKVMKQLKRRRYTGWGRLSRKLINGIRDKQSGKTILDFLKSDGFANRNFMQLIHDDSLTFKEDIQKAQVSGQGDSLHEHIANLAGSPAIKKGILQTVKVVDELVKVMGRHKPENIVIEMARENQGSSGSETPGTSESATPESSGSEVEFSHEYWMRHALTLAKRARDEREVPVGAVLVLNNRVIGEGWNRAIGLHDPTAHAEIMALRQGGLVMQNYRLIDATLYVTFEPCVMCAGAMIHSRIGRVVFGVRNAKTGAAGSLMDVLHYPGMNHRVEITEGILADECAALLCYFFRMPRTTQKGQKNSRERMKRIEEGIKELGSQILKEHPVENTQLQNEKLYLYYLQNGRDMYVDQELDINRLSDYDVDHIVPQSFLKDDSIDNKVLTRSDKNRGKSDNVPSEEVVKKMKNYWRQLLNAKLITQRKFDNLTKAERGGLSELDKAGFIKRQLVETRQITKHVAQILDSRMNTKYDENDKLIREVKVITLKSKLVSDFRKDFQFYKVREINNYHHAHDAYLNAVVGTALIKKYPKLESEFVYGDYKVYDVRKMIAKSEQEIGKATAKYFFYSNIMNFFKTEITLANGEIRKRPLIETNGETGEIVWDKGRDFATVRKVLSMPQVNIVKKTEVQTGGFSKESILPKRNSDKLIARKKDWDPKKYGGFDSPTVAYSVLVVAKVEKGKSKKLKSVKELLGITIMERSSFEKNPIDFLEAKGYKEVKKDLIIKLPKYSLFELENGRKRMLASAGELQKGNELALPSKYVNFLYLASHYEKLKGSPEDNEQKQLFVEQHKHYLDEIIEQISEFSKRVILADANLDKVLSAYNKHRDKPIREQAENIIHLFTLTNLGAPAAFKYFDTTIDRKRYTSTKEVLDATLIHQSITGLYETRIDLSQLGGD

SEQ ID NO: 272 - protein, 1540 aa, synthetic construct
  REGION 1..1540: note = 110.1 Cas9 TadAins 1250 polypeptide sequence
MDKKYSIGLAIGTNSVGWAVITDEYKVPSKKFKVLGNTDRHSIKKNLIGALLFDSGETAEATRLKRTARRRYTRRKNRICYLQEIFSNEMAKVDDSFFHRLEESFLVEEDKKHERHPIFGNIVDEVAYHEKYPTIYHLRKKLVDSTDKADLRLIYLALAHMIKFRGHFLIEGDLNPDNSDVDKLFIQLVQTYNQLFEENPINASGVDAKAILSARLSKSRRLENLIAQLPGEKKNGLFGNLIALSLGLTPNFKSNFDLAEDAKLQLSKDTYDDDLDNLLAQIGDQYADLFLAAKNLSDAILLSDILRVNTEITKAPLSASMIKRYDEHHQDLTLLKALVRQQLPEKYKEIFFDQSKNGYAGYIDGGASQEEFYKFIKPILEKMDGTEELLVKLNREDLLRKQRTFDNGSIPHQIHLGELHAILRRQEDFYPFLKDNREKIEKILTFRIPYYVGPLARGNSRFAWMTRKSEETITPWNFEEVVDKGASAQSFIERMTNFDKNLPNEKVLPKHSLLYEYFTVYNELTKVKYVTEGMRKPAFLSGEQKKAIVDLLFKTNRKVTVKQLKEDYFKKIECFDSVEISGVEDRFNASLGTYHDLLKIIKDKDFLDNEENEDILEDIVLTLTLFEDREMIEERLKTYAHLFDDKVMKQLKRRRYTGWGRLSRKLINGIRDKQSGKTILDFLKSDGFANRNFMQLIHDDSLTFKEDIQKAQVSGQGDSLHEHIANLAGSPAIKKGILQTVKVVDELVKVMGRHKPENIVIEMARENQTTQKGQKNSRERMKRIEEGIKELGSQILKEHPVENTQLQNEKLYLYYLQNGRDMYVDQELDINRLSDYDVDHIVPQSFLKDDSIDNKVLTRSDKNRGKSDNVPSEEVVKKMKNYWRQLLNAKLITQRKFDNLTKAERGGLSELDKAGFIKRQLVETRQITKHVAQILDSRMNTKYDENDKLIREVKVITLKSKLVSDFRKDFQFYKVREINNYHHAHDAYLNAVVGTALIKKYPKLESEFVYGDYKVYDVRKMIAKSEQEIGKATAKYFFYSNIMNFFKTEITLANGEIRKRPLIETNGETGEIVWDKGRDFATVRKVLSMPQVNIVKKTEVQTGGFSKESILPKRNSDKLIARKKDWDPKKYGGFDSPTVAYSVLVVAKVEKGKSKKLKSVKELLGITIMERSSFEKNPIDFLEAKGYKEVKKDLIIKLPKYSLFELENGRKRMLASAGELQKGNELALPSKYVNFLYLASHYEKLKGSPGSSGSETPGTSESATPESSGSEVEFSHEYWMRHALTLAKRARDEREVPVGAVLVLNNRVIGEGWNRAIGLHDPTAHAEIMALRQGGLVMQNYRLIDATLYVTFEPCVMCAGAMIHSRIGRVVFGVRNAKTGAAGSLMDVLHYPGMNHRVEITEGILADECAALLCYFFRMPREDNEQKQLFVEQHKHYLDEIIEQISEFSKRVILADANLDKVLSAYNKHRDKPIREQAENIIHLFTLTNLGAPAAFKYFDTTIDRKRYTSTKEVLDATLIHQSITGLYETRIDLSQLGGD

SEQ ID NO: 273 - protein, 1543 aa, synthetic construct
  REGION 1..1543: note = 110.2 Cas9 TadAins 1250 polypeptide sequence
MDKKYSIGLAIGTNSVGWAVITDEYKVPSKKFKVLGNTDRHSIKKNLIGALLFDSGETAEATRLKRTARRRYTRRKNRICYLQEIFSNEMAKVDDSFFHRLEESFLVEEDKKHERHPIFGNIVDEVAYHEKYPTIYHLRKKLVDSTDKADLRLIYLALAHMIKFRGHFLIEGDLNPDNSDVDKLFIQLVQTYNQLFEENPINASGVDAKAILSARLSKSRRLENLIAQLPGEKKNGLFGNLIALSLGLTPNFKSNFDLAEDAKLQLSKDTYDDDLDNLLAQIGDQYADLFLAAKNLSDAILLSDILRVNTEITKAPLSASMIKRYDEHHQDLTLLKALVRQQLPEKYKEIFFDQSKNGYAGYIDGGASQEEFYKFIKPILEKMDGTEELLVKLNREDLLRKQRTFDNGSIPHQIHLGELHAILRRQEDFYPFLKDNREKIEKILTFRIPYYVGPLARGNSRFAWMTRKSEETITPWNFEEVVDKGASAQSFIERMTNFDKNLPNEKVLPKHSLLYEYFTVYNELTKVKYVTEGMRKPAFLSGEQKKAIVDLLFKTNRKVTVKQLKEDYFKKIECFDSVEISGVEDRFNASLGTYHDLLKIIKDKDFLDNEENEDILEDIVLTLTLFEDREMIEERLKTYAHLFDDKVMKQLKRRRYTGWGRLSRKLINGIRDKQSGKTILDFLKSDGFANRNFMQLIHDDSLTFKEDIQKAQVSGQGDSLHEHIANLAGSPAIKKGILQTVKVVDELVKVMGRHKPENIVIEMARENQTTQKGQKNSRERMKRIEEGIKELGSQILKEHPVENTQLQNEKLYLYYLQNGRDMYVDQELDINRLSDYDVDHIVPQSFLKDDSIDNKVLTRSDKNRGKSDNVPSEEVVKKMKNYWRQLLNAKLITQRKFDNLTKAERGGLSELDKAGFIKRQLVETRQITKHVAQILDSRMNTKYDENDKLIREVKVITLKSKLVSDFRKDFQFYKVREINNYHHAHDAYLNAVVGTALIKKYPKLESEFVYGDYKVYDVRKMIAKSEQEIGKATAKYFFYSNIMNFFKTEITLANGEIRKRPLIETNGETGEIVWDKGRDFATVRKVLSMPQVNIVKKTEVQTGGFSKESILPKRNSDKLIARKKDWDPKKYGGFDSPTVAYSVLVVAKVEKGKSKKLKSVKELLGITIMERSSFEKNPIDFLEAKGYKEVKKDLIIKLPKYSLFELENGRKRMLASAGELQKGNELALPSKYVNFLYLASHYEKLKGSPGSSGSSGSETPGTSESATPESSGSEVEFSHEYWMRHALTLAKRARDEREVPVGAVLVLNNRVIGEGWNRAIGLHDPTAHAEIMALRQGGLVMQNYRLIDATLYVTFEPCVMCAGAMIHSRIGRVVFGVRNAKTGAAGSLMDVLHYPGMNHRVEITEGILADECAALLCYFFRMPREDNEQKQLFVEQHKHYLDEIIEQISEFSKRVILADANLDKVLSAYNKHRDKPIREQAENIIHLFTLTNLGAPAAFKYFDTTIDRKRYTSTKEVLDATLIHQSITGLYETRIDLSQLGGD

SEQ ID NO: 274 - protein, 1546 aa, synthetic construct
  REGION 1..1546: note = 110.3 Cas9 TadAins 1250 polypeptide sequence
MDKKYSIGLAIGTNSVGWAVITDEYKVPSKKFKVLGNTDRHSIKKNLIGALLFDSGETAEATRLKRTARRRYTRRKNRICYLQEIFSNEMAKVDDSFFHRLEESFLVEEDKKHERHPIFGNIVDEVAYHEKYPTIYHLRKKLVDSTDKADLRLIYLALAHMIKFRGHFLIEGDLNPDNSDVDKLFIQLVQTYNQLFEENPINASGVDAKAILSARLSKSRRLENLIAQLPGEKKNGLFGNLIALSLGLTPNFKSNFDLAEDAKLQLSKDTYDDDLDNLLAQIGDQYADLFLAAKNLSDAILLSDILRVNTEITKAPLSASMIKRYDEHHQDLTLLKALVRQQLPEKYKEIFFDQSKNGYAGYIDGGASQEEFYKFIKPILEKMDGTEELLVKLNREDLLRKQRTFDNGSIPHQIHLGELHAILRRQEDFYPFLKDNREKIEKILTFRIPYYVGPLARGNSRFAWMTRKSEETITPWNFEEVVDKGASAQSFIERMTNFDKNLPNEKVLPKHSLLYEYFTVYNELTKVKYVTEGMRKPAFLSGEQKKAIVDLLFKTNRKVTVKQLKEDYFKKIECFDSVEISGVEDRFNASLGTYHDLLKIIKDKDFLDNEENEDILEDIVLTLTLFEDREMIEERLKTYAHLFDDKVMKQLKRRRYTGWGRLSRKLINGIRDKQSGKTILDFLKSDGFANRNFMQLIHDDSLTFKEDIQKAQVSGQGDSLHEHIANLAGSPAIKKGILQTVKVVDELVKVMGRHKPENIVIEMARENQTTQKGQKNSRERMKRIEEGIKELGSQILKEHPVENTQLQNEKLYLYYLQNGRDMYVDQELDINRLSDYDVDHIVPQSFLKDDSIDNKVLTRSDKNRGKSDNVPSEEVVKKMKNYWRQLLNAKLITQRKFDNLTKAERGGLSELDKAGFIKRQLVETRQITKHVAQILDSRMNTKYDENDKLIREVKVITLKSKLVSDFRKDFQFYKVREINNYHHAHDAYLNAVVGTALIKKYPKLESEFVYGDYKVYDVRKMIAKSEQEIGKATAKYFFYSNIMNFFKTEITLANGEIRKRPLIETNGETGEIVWDKGRDFATVRKVLSMPQVNIVKKTEVQTGGFSKESILPKRNSDKLIARKKDWDPKKYGGFDSPTVAYSVLVVAKVEKGKSKKLKSVKELLGITIMERSSFEKNPIDFLEAKGYKEVKKDLIIKLPKYSLFELENGRKRMLASAGELQKGNELALPSKYVNFLYLASHYEKLKGSPGSSGSSGSETPGTSESATPESGSSSGSEVEFSHEYWMRHALTLAKRARDEREVPVGAVLVLNNRVIGEGWNRAIGLHDPTAHAEIMALRQGGLVMQNYRLIDATLYVTFEPCVMCAGAMIHSRIGRVVFGVRNAKTGAAGSLMDVLHYPGMNHRVEITEGILADECAALLCYFFRMPREDNEQKQLFVEQHKHYLDEIIEQISEFSKRVILADANLDKVLSAYNKHRDKPIREQAENIIHLFTLTNLGAPAAFKYFDTTIDRKRYTSTKEVLDATLIHQSITGLYETRIDLSQLGGD

SEQ ID NO: 275 - protein, 1546 aa, synthetic construct
  REGION 1..1546: note = 110.4 Cas9 TadAins 1250 polypeptide sequence
MDKKYSIGLAIGTNSVGWAVITDEYKVPSKKFKVLGNTDRHSIKKNLIGALLFDSGETAEATRLKRTARRRYTRRKNRICYLQEIFSNEMAKVDDSFFHRLEESFLVEEDKKHERHPIFGNIVDEVAYHEKYPTIYHLRKKLVDSTDKADLRLIYLALAHMIKFRGHFLIEGDLNPDNSDVDKLFIQLVQTYNQLFEENPINASGVDAKAILSARLSKSRRLENLIAQLPGEKKNGLFGNLIALSLGLTPNFKSNFDLAEDAKLQLSKDTYDDDLDNLLAQIGDQYADLFLAAKNLSDAILLSDILRVNTEITKAPLSASMIKRYDEHHQDLTLLKALVRQQLPEKYKEIFFDQSKNGYAGYIDGGASQEEFYKFIKPILEKMDGTEELLVKLNREDLLRKQRTFDNGSIPHQIHLGELHAILRRQEDFYPFLKDNREKIEKILTFRIPYYVGPLARGNSRFAWMTRKSEETITPWNFEEVVDKGASAQSFIERMTNFDKNLPNEKVLPKHSLLYEYFTVYNELTKVKYVTEGMRKPAFLSGEQKKAIVDLLFKTNRKVTVKQLKEDYFKKIECFDSVEISGVEDRFNASLGTYHDLLKIIKDKDFLDNEENEDILEDIVLTLTLFEDREMIEERLKTYAHLFDDKVMKQLKRRRYTGWGRLSRKLINGIRDKQSGKTILDFLKSDGFANRNFMQLIHDDSLTFKEDIQKAQVSGQGDSLHEHIANLAGSPAIKKGILQTVKVVDELVKVMGRHKPENIVIEMARENQTTQKGQKNSRERMKRIEEGIKELGSQILKEHPVENTQLQNEKLYLYYLQNGRDMYVDQELDINRLSDYDVDHIVPQSFLKDDSIDNKVLTRSDKNRGKSDNVPSEEVVKKMKNYWRQLLNAKLITQRKFDNLTKAERGGLSELDKAGFIKRQLVETRQITKHVAQILDSRMNTKYDENDKLIREVKVITLKSKLVSDFRKDFQFYKVREINNYHHAHDAYLNAVVGTALIKKYPKLESEFVYGDYKVYDVRKMIAKSEQEIGKATAKYFFYSNIMNFFKTEITLANGEIRKRPLIETNGETGEIVWDKGRDFATVRKVLSMPQVNIVKKTEVQTGGFSKESILPKRNSDKLIARKKDWDPKKYGGFDSPTVAYSVLVVAKVEKGKSKKLKSVKELLGITIMERSSFEKNPIDFLEAKGYKEVKKDLIIKLPKYSLFELENGRKRMLASAGELQKGNELALPSKYVNFLYLASHYEKLKGSPGSSGSSGSETPGTSESATPESGSSSGSEVEFSHEYWMRHALTLAKRARDEREVPVGAVLVLNNRVIGEGWNRAIGLHDPTAHAEIMALRQGGLVMQNYRLIDATLYVTFEPCVMCAGAMIHSRIGRVVFGVRNAKTGAAGSLMDVLHYPGMNHRVEITEGILADECAALLCYFFRMRREDNEQKQLFVEQHKHYLDEIIEQISEFSKRVILADANLDKVLSAYNKHRDKPIREQAENIIHLFTLTNLGAPAAFKYFDTTIDRKRYTSTKEVLDATLIHQSITGLYETRIDLSQLGGD

SEQ ID NO: 276 - protein, 1546 aa, synthetic construct
  REGION 1..1546: note = 110.5 Cas9 TadAins 1249 polypeptide sequence
MDKKYSIGLAIGTNSVGWAVITDEYKVPSKKFKVLGNTDRHSIKKNLIGALLFDSGETAEATRLKRTARRRYTRRKNRICYLQEIFSNEMAKVDDSFFHRLEESFLVEEDKKHERHPIFGNIVDEVAYHEKYPTIYHLRKKLVDSTDKADLRLIYLALAHMIKFRGHFLIEGDLNPDNSDVDKLFIQLVQTYNQLFEENPINASGVDAKAILSARLSKSRRLENLIAQLPGEKKNGLFGNLIALSLGLTPNFKSNFDLAEDAKLQLSKDTYDDDLDNLLAQIGDQYADLFLAAKNLSDAILLSDILRVNTEITKAPLSASMIKRYDEHHQDLTLLKALVRQQLPEKYKEIFFDQSKNGYAGYIDGGASQEEFYKFIKPILEKMDGTEELLVKLNREDLLRKQRTFDNGSIPHQIHLGELHAILRRQEDFYPFLKDNREKIEKILTFRIPYYVGPLARGNSRFAWMTRKSEETITPWNFEEVVDKGASAQSFIERMTNFDKNLPNEKVLPKHSLLYEYFTVYNELTKVKYVTEGMRKPAFLSGEQKKAIVDLLFKTNRKVTVKQLKEDYFKKIECFDSVEISGVEDRFNASLGTYHDLLKIIKDKDFLDNEENEDILEDIVLTLTLFEDREMIEERLKTYAHLFDDKVMKQLKRRRYTGWGRLSRKLINGIRDKQSGKTILDFLKSDGFANRNFMQLIHDDSLTFKEDIQKAQVSGQGDSLHEHIANLAGSPAIKKGILQTVKVVDELVKVMGRHKPENIVIEMARENQTTQKGQKNSRERMKRIEEGIKELGSQILKEHPVENTQLQNEKLYLYYLQNGRDMYVDQELDINRLSDYDVDHIVPQSFLKDDSIDNKVLTRSDKNRGKSDNVPSEEVVKKMKNYWRQLLNAKLITQRKFDNLTKAERGGLSELDKAGFIKRQLVETRQITKHVAQILDSRMNTKYDENDKLIREVKVITLKSKLVSDFRKDFQFYKVREINNYHHAHDAYLNAVVGTALIKKYPKLESEFVYGDYKVYDVRKMIAKSEQEIGKATAKYFFYSNIMNFFKTEITLANGEIRKRPLIETNGETGEIVWDKGRDFATVRKVLSMPQVNIVKKTEVQTGGFSKESILPKRNSDKLIARKKDWDPKKYGGFDSPTVAYSVLVVAKVEKGKSKKLKSVKELLGITIMERSSFEKNPIDFLEAKGYKEVKKDLIIKLPKYSLFELENGRKRMLASAGELQKGNELALPSKYVNFLYLASHYEKLKGSGSSGSSGSETPGTSESATPESGSSSGSEVEFSHEYWMRHALTLAKRARDEREVPVGAVLVLNNRVIGEGWNRAIGLHDPTAHAEIMALRQGGLVMQNYRLIDATLYVTFEPCVMCAGAMIHSRIGRVVFGVRNAKTGAAGSLMDVLHYPGMNHRVEITEGILADECAALLCYFFRMRRPEDNEQKQLFVEQHKHYLDEIIEQISEFSKRVILADANLDKVLSAYNKHRDKPIREQAENIIHLFTLTNLGAPAAFKYFDTTIDRKRYTSTKEVLDATLIHQSITGLYETRIDLSQLGGD

SEQ ID NO: 277 - protein, 1551 aa, synthetic construct
  REGION 1..1551: note = 110.5 Cas9 TadAins delta59-66 1250 polypeptide sequence
MDKKYSIGLAIGTNSVGWAVITDEYKVPSKKFKVLGNTDRHSIKKNLIGALLFDSGETAEATRLKRTARRRYTRRKNRICYLQEIFSNEMAKVDDSFFHRLEESFLVEEDKKHERHPIFGNIVDEVAYHEKYPTIYHLRKKLVDSTDKADLRLIYLALAHMIKFRGHFLIEGDLNPDNSDVDKLFIQLVQTYNQLFEENPINASGVDAKAILSARLSKSRRLENLIAQLPGEKKNGLFGNLIALSLGLTPNFKSNFDLAEDAKLQLSKDTYDDDLDNLLAQIGDQYADLFLAAKNLSDAILLSDILRVNTEITKAPLSASMIKRYDEHHQDLTLLKALVRQQLPEKYKEIFFDQSKNGYAGYIDGGASQEEFYKFIKPILEKMDGTEELLVKLNREDLLRKQRTFDNGSIPHQIHLGELHAILRRQEDFYPFLKDNREKIEKILTFRIPYYVGPLARGNSRFAWMTRKSEETITPWNFEEVVDKGASAQSFIERMTNFDKNLPNEKVLPKHSLLYEYFTVYNELTKVKYVTEGMRKPAFLSGEQKKAIVDLLFKTNRKVTVKQLKEDYFKKIECFDSVEISGVEDRFNASLGTYHDLLKIIKDKDFLDNEENEDILEDIVLTLTLFEDREMIEERLKTYAHLFDDKVMKQLKRRRYTGWGRLSRKLINGIRDKQSGKTILDFLKSDGFANRNFMQLIHDDSLTFKEDIQKAQVSGQGDSLHEHIANLAGSPAIKKGILQTVKVVDELVKVMGRHKPENIVIEMARENQTTQKGQKNSRERMKRIEEGIKELGSQILKEHPVENTQLQNEKLYLYYLQNGRDMYVDQELDINRLSDYDVDHIVPQSFLKDDSIDNKVLTRSDKNRGKSDNVPSEEVVKKMKNYWRQLLNAKLITQRKFDNLTKAERGGLSELDKAGFIKRQLVETRQITKHVAQILDSRMNTKYDENDKLIREVKVITLKSKLVSDFRKDFQFYKVREINNYHHAHDAYLNAVVGTALIKKYPKLESEFVYGDYKVYDVRKMIAKSEQEIGKATAKYFFYSNIMNFFKTEITLANGEIRKRPLIETNGETGEIVWDKGRDFATVRKVLSMPQVNIVKKTEVQTGGFSKESILPKRNSDKLIARKKDWDPKKYGGFDSPTVAYSVLVVAKVEKGKSKKLKSVKELLGITIMERSSFEKNPIDFLEAKGYKEVKKDLIIKLPKYSLFELENGRKRMLASAGELQKGNELALPSKYVNFLYLASHYEKLKGSPGSSGSSGSETPGTSESATPESGSSGSEVEFSHEYWMRHALTLAKRARDEREVPVGAVLVLNNRVIGEGWNRAHAEIMALRQGGLVMQNYRLIDATLYVTFEPCVMCAGAMIHSRIGRVVFGVRNAKTGAAGSLMDVLHYPGMNHRVEITEGILADECAALLCYFFRMPRQVFNAQKKAQSSTDEDNEQKQLFVEQHKHYLDEIIEQISEFSKRVILADANLDKVLSAYNKHRDKPIREQAENIIHLFTLTNLGAPAAFKYFDTTIDRKRYTSTKEVLDATLIHQSITGLYETRIDLSQLGGD

SEQ ID NO: 278 - protein, 1546 aa, synthetic construct
  REGION 1..1546: note = 110.6 Cas9 TadAins 1251 polypeptide sequence
MDKKYSIGLAIGTNSVGWAVITDEYKVPSKKFKVLGNTDRHSIKKNLIGALLFDSGETAEATRLKRTARRRYTRRKNRICYLQEIFSNEMAKVDDSFFHRLEESFLVEEDKKHERHPIFGNIVDEVAYHEKYPTIYHLRKKLVDSTDKADLRLIYLALAHMIKFRGHFLIEGDLNPDNSDVDKLFIQLVQTYNQLFEENPINASGVDAKAILSARLSKSRRLENLIAQLPGEKKNGLFGNLIALSLGLTPNFKSNFDLAEDAKLQLSKDTYDDDLDNLLAQIGDQYADLFLAAKNLSDAILLSDILRVNTEITKAPLSASMIKRYDEHHQDLTLLKALVRQQLPEKYKEIFFDQSKNGYAGYIDGGASQEEFYKFIKPILEKMDGTEELLVKLNREDLLRKQRTFDNGSIPHQIHLGELHAILRRQEDFYPFLKDNREKIEKILTFRIPYYVGPLARGNSRFAWMTRKSEETITPWNFEEVVDKGASAQSFIERMTNFDKNLPNEKVLPKHSLLYEYFTVYNELTKVKYVTEGMRKPAFLSGEQKKAIVDLLFKTNRKVTVKQLKEDYFKKIECFDSVEISGVEDRFNASLGTYHDLLKIIKDKDFLDNEENEDILEDIVLTLTLFEDREMIEERLKTYAHLFDDKVMKQLKRRRYTGWGRLSRKLINGIRDKQSGKTILDFLKSDGFANRNFMQLIHDDSLTFKEDIQKAQVSGQGDSLHEHIANLAGSPAIKKGILQTVKVVDELVKVMGRHKPENIVIEMARENQTTQKGQKNSRERMKRIEEGIKELGSQILKEHPVENTQLQNEKLYLYYLQNGRDMYVDQELDINRLSDYDVDHIVPQSFLKDDSIDNKVLTRSDKNRGKSDNVPSEEVVKKMKNYWRQLLNAKLITQRKFDNLTKAERGGLSELDKAGFIKRQLVETRQITKHVAQILDSRMNTKYDENDKLIREVKVITLKSKLVSDFRKDFQFYKVREINNYHHAHDAYLNAVVGTALIKKYPKLESEFVYGDYKVYDVRKMIAKSEQEIGKATAKYFFYSNIMNFFKTEITLANGEIRKRPLIETNGETGEIVWDKGRDFATVRKVLSMPQVNIVKKTEVQTGGFSKESILPKRNSDKLIARKKDWDPKKYGGFDSPTVAYSVLVVAKVEKGKSKKLKSVKELLGITIMERSSFEKNPIDFLEAKGYKEVKKDLIIKLPKYSLFELENGRKRMLASAGELQKGNELALPSKYVNFLYLASHYEKLKGSPEGSSGSSGSETPGTSESATPESGSSSGSEVEFSHEYWMRHALTLAKRARDEREVPVGAVLVLNNRVIGEGWNRAIGLHDPTAHAEIMALRQGGLVMQNYRLIDATLYVTFEPCVMCAGAMIHSRIGRVVFGVRNAKTGAAGSLMDVLHYPGMNHRVEITEGILADECAALLCYFFRMRRDNEQKQLFVEQHKHYLDEIIEQISEFSKRVILADANLDKVLSAYNKHRDKPIREQAENIIHLFTLTNLGAPAAFKYFDTTIDRKRYTSTKEVLDATLIHQSITGLYETRIDLSQLGGD

SEQ ID NO: 279 - protein, 1546 aa, synthetic construct
  REGION 1..1546: note = 110.7 Cas9 TadAins 1252 polypeptide sequence
MDKKYSIGLAIGTNSVGWAVITDEYKVPSKKFKVLGNTDRHSIKKNLIGALLFDSGETAEATRLKRTARRRYTRRKNRICYLQEIFSNEMAKVDDSFFHRLEESFLVEEDKKHERHPIFGNIVDEVAYHEKYPTIYHLRKKLVDSTDKADLRLIYLALAHMIKFRGHFLIEGDLNPDNSDVDKLFIQLVQTYNQLFEENPINASGVDAKAILSARLSKSRRLENLIAQLPGEKKNGLFGNLIALSLGLTPNFKSNFDLAEDAKLQLSKDTYDDDLDNLLAQIGDQYADLFLAAKNLSDAILLSDILRVNTEITKAPLSASMIKRYDEHHQDLTLLKALVRQQLPEKYKEIFFDQSKNGYAGYIDGGASQEEFYKFIKPILEKMDGTEELLVKLNREDLLRKQRTFDNGSIPHQIHLGELHAILRRQEDFYPFLKDNREKIEKILTFRIPYYVGPLARGNSRFAWMTRKSEETITPWNFEEVVDKGASAQSFIERMTNFDKNLPNEKVLPKHSLLYEYFTVYNELTKVKYVTEGMRKPAFLSGEQKKAIVDLLFKTNRKVTVKQLKEDYFKKIECFDSVEISGVEDRFNASLGTYHDLLKIIKDKDFLDNEENEDILEDIVLTLTLFEDREMIEERLKTYAHLFDDKVMKQLKRRRYTGWGRLSRKLINGIRDKQSGKTILDFLKSDGFANRNFMQLIHDDSLTFKEDIQKAQVSGQGDSLHEHIANLAGSPAIKKGILQTVKVVDELVKVMGRHKPENIVIEMARENQTTQKGQKNSRERMKRIEEGIKELGSQILKEHPVENTQLQNEKLYLYYLQNGRDMYVDQELDINRLSDYDVDHIVPQSFLKDDSIDNKVLTRSDKNRGKSDNVPSEEVVKKMKNYWRQLLNAKLITQRKFDNLTKAERGGLSELDKAGFIKRQLVETRQITKHVAQILDSRMNTKYDENDKLIREVKVITLKSKLVSDFRKDFQFYKVREINNYHHAHDAYLNAVVGTALIKKYPKLESEFVYGDYKVYDVRKMIAKSEQEIGKATAKYFFYSNIMNFFKTEITLANGEIRKRPLIETNGETGEIVWDKGRDFATVRKVLSMPQVNIVKKTEVQTGGFSKESILPKRNSDKLIARKKDWDPKKYGGFDSPTVAYSVLVVAKVEKGKSKKLKSVKELLGITIMERSSFEKNPIDFLEAKGYKEVKKDLIIKLPKYSLFELENGRKRMLASAGELQKGNELALPSKYVNFLYLASHYEKLKGSPEDGSSGSSGSETPGTSESATPESGSSSGSEVEFSHEYWMRHALTLAKRARDEREVPVGAVLVLNNRVIGEGWNRAIGLHDPTAHAEIMALRQGGLVMQNYRLIDATLYVTFEPCVMCAGAMIHSRIGRVVFGVRNAKTGAAGSLMDVLHYPGMNHRVEITEGILADECAALLCYFFRMRRNEQKQLFVEQHKHYLDEIIEQISEFSKRVILADANLDKVLSAYNKHRDKPIREQAENIIHLFTLTNLGAPAAFKYFDTTIDRKRYTSTKEVLDATLIHQSITGLYETRIDLSQLGGD

SEQ ID NO: 280 - protein, 1533 aa, synthetic construct
  REGION 1..1533: note = 110.8 Cas9 TadAins delta59-66 C-truncate 1250 polypeptide sequence
MDKKYSIGLAIGTNSVGWAVITDEYKVPSKKFKVLGNTDRHSIKKNLIGALLFDSGETAEATRLKRTARRRYTRRKNRICYLQEIFSNEMAKVDDSFFHRLEESFLVEEDKKHERHPIFGNIVDEVAYHEKYPTIYHLRKKLVDSTDKADLRLIYLALAHMIKFRGHFLIEGDLNPDNSDVDKLFIQLVQTYNQLFEENPINASGVDAKAILSARLSKSRRLENLIAQLPGEKKNGLFGNLIALSLGLTPNFKSNFDLAEDAKLQLSKDTYDDDLDNLLAQIGDQYADLFLAAKNLSDAILLSDILRVNTEITKAPLSASMIKRYDEHHQDLTLLKALVRQQLPEKYKEIFFDQSKNGYAGYIDGGASQEEFYKFIKPILEKMDGTEELLVKLNREDLLRKQRTFDNGSIPHQIHLGELHAILRRQEDFYPFLKDNREKIEKILTFRIPYYVGPLARGNSRFAWMTRKSEETITPWNFEEVVDKGASAQSFIERMTNFDKNLPNEKVLPKHSLLYEYFTVYNELTKVKYVTEGMRKPAFLSGEQKKAIVDLLFKTNRKVTVKQLKEDYFKKIECFDSVEISGVEDRFNASLGTYHDLLKIIKDKDFLDNEENEDILEDIVLTLTLFEDREMIEERLKTYAHLFDDKVMKQLKRRRYTGWGRLSRKLINGIRDKQSGKTILDFLKSDGFANRNFMQLIHDDSLTFKEDIQKAQVSGQGDSLHEHIANLAGSPAIKKGILQTVKVVDELVKVMGRHKPENIVIEMARENQTTQKGQKNSRERMKRIEEGIKELGSQILKEHPVENTQLQNEKLYLYYLQNGRDMYVDQELDINRLSDYDVDHIVPQSFLKDDSIDNKVLTRSDKNRGKSDNVPSEEVVKKMKNYWRQLLNAKLITQRKFDNLTKAERGGLSELDKAGFIKRQLVETRQITKHVAQILDSRMNTKYDENDKLIREVKVITLKSKLVSDFRKDFQFYKVREINNYHHAHDAYLNAVVGTALIKKYPKLESEFVYGDYKVYDVRKMIAKSEQEIGKATAKYFFYSNIMNFFKTEITLANGEIRKRPLIETNGETGEIVWDKGRDFATVRKVLSMPQVNIVKKTEVQTGGFSKESILPKRNSDKLIARKKDWDPKKYGGFDSPTVAYSVLVVAKVEKGKSKKLKSVKELLGITIMERSSFEKNPIDFLEAKGYKEVKKDLIIKLPKYSLFELENGRKRMLASAGELQKGNELALPSKYVNFLYLASHYEKLKGSPGSSGSETPGTSESATPESSGSEVEFSHEYWMRHALTLAKRARDEREVPVGAVLVLNNRVIGEGWNRAHAEIMALRQGGLVMQNYRLIDATLYVTFEPCVMCAGAMIHSRIGRVVFGVRNAKTGAAGSLMDVLHYPGMNHRVEITEGILADECAALLCYFFRMPRQEDNEQKQLFVEQHKHYLDEIIEQISEFSKRVILADANLDKVLSAYNKHRDKPIREQAENIIHLFTLTNLGAPAAFKYFDTTIDRKRYTSTKEVLDATLIHQSITGLYETRIDLSQLGGD

SEQ ID NO: 281 - protein, 1549 aa, synthetic construct
  REGION 1..1549: note = 111.1 Cas9 TadAins 997 polypeptide sequence
MDKKYSIGLAIGTNSVGWAVITDEYKVPSKKFKVLGNTDRHSIKKNLIGALLFDSGETAEATRLKRTARRRYTRRKNRICYLQEIFSNEMAKVDDSFFHRLEESFLVEEDKKHERHPIFGNIVDEVAYHEKYPTIYHLRKKLVDSTDKADLRLIYLALAHMIKFRGHFLIEGDLNPDNSDVDKLFIQLVQTYNQLFEENPINASGVDAKAILSARLSKSRRLENLIAQLPGEKKNGLFGNLIALSLGLTPNFKSNFDLAEDAKLQLSKDTYDDDLDNLLAQIGDQYADLFLAAKNLSDAILLSDILRVNTEITKAPLSASMIKRYDEHHQDLTLLKALVRQQLPEKYKEIFFDQSKNGYAGYIDGGASQEEFYKFIKPILEKMDGTEELLVKLNREDLLRKQRTFDNGSIPHQIHLGELHAILRRQEDFYPFLKDNREKIEKILTFRIPYYVGPLARGNSRFAWMTRKSEETITPWNFEEVVDKGASAQSFIERMTNFDKNLPNEKVLPKHSLLYEYFTVYNELTKVKYVTEGMRKPAFLSGEQKKAIVDLLFKTNRKVTVKQLKEDYFKKIECFDSVEISGVEDRFNASLGTYHDLLKIIKDKDFLDNEENEDILEDIVLTLTLFEDREMIEERLKTYAHLFDDKVMKQLKRRRYTGWGRLSRKLINGIRDKQSGKTILDFLKSDGFANRNFMQLIHDDSLTFKEDIQKAQVSGQGDSLHEHIANLAGSPAIKKGILQTVKVVDELVKVMGRHKPENIVIEMARENQTTQKGQKNSRERMKRIEEGIKELGSQILKEHPVENTQLQNEKLYLYYLQNGRDMYVDQELDINRLSDYDVDHIVPQSFLKDDSIDNKVLTRSDKNRGKSDNVPSEEVVKKMKNYWRQLLNAKLITQRKFDNLTKAERGGLSELDKAGFIKRQLVETRQITKHVAQILDSRMNTKYDENDKLIREVKVITLKSKLVSDFRKDFQFYKVREINNYHHAHDAYLNAVVGTALSHEYWMRHALTLAKRARDEREVPVGAVLVLNNRVIGEGWNRAIGLHDPTAHAEIMALRQGGLVMQNYRLIDATLYVTFEPCVMCAGAMIHSRIGRVVFGVRNAKTGAAGSLMDVLHYPGMNHRVEITEGILADECAALLCYFFRMPRQVFNAQKKAQSSTDGSSGSETPGTSESATPESSGIKKYPKLESEFVYGDYKVYDVRKMIAKSEQEIGKATAKYFFYSNIMNFFKTEITLANGEIRKRPLIETNGETGEIVWDKGRDFATVRKVLSMPQVNIVKKTEVQTGGFSKESILPKRNSDKLIARKKDWDPKKYGGFDSPTVAYSVLVVAKVEKGKSKKLKSVKELLGITIMERSSFEKNPIDFLEAKGYKEVKKDLIIKLPKYSLFELENGRKRMLASAGELQKGNELALPSKYVNFLYLASHYEKLKGSPEDNEQKQLFVEQHKHYLDEIIEQISEFSKRVILADANLDKVLSAYNKHRDKPIREQAENIIHLFTLTNLGAPAAFKYFDTTIDRKRYTSTKEVLDATLIHQSITGLYETRIDLSQLGGD

SEQ ID NO: 282 - protein, 1555 aa, synthetic construct
  REGION 1..1555: note = 111.2 Cas9 TadAins 997 polypeptide sequence
MDKKYSIGLAIGTNSVGWAVITDEYKVPSKKFKVLGNTDRHSIKKNLIGALLFDSGETAEATRLKRTARRRYTRRKNRICYLQEIFSNEMAKVDDSFFHRLEESFLVEEDKKHERHPIFGNIVDEVAYHEKYPTIYHLRKKLVDSTDKADLRLIYLALAHMIKFRGHFLIEGDLNPDNSDVDKLFIQLVQTYNQLFEENPINASGVDAKAILSARLSKSRRLENLIAQLPGEKKNGLFGNLIALSLGLTPNFKSNFDLAEDAKLQLSKDTYDDDLDNLLAQIGDQYADLFLAAKNLSDAILLSDILRVNTEITKAPLSASMIKRYDEHHQDLTLLKALVRQQLPEKYKEIFFDQSKNGYAGYIDGGASQEEFYKFIKPILEKMDGTEELLVKLNREDLLRKQRTFDNGSIPHQIHLGELHAILRRQEDFYPFLKDNREKIEKILTFRIPYYVGPLARGNSRFAWMTRKSEETITPWNFEEVVDKGASAQSFIERMTNFDKNLPNEKVLPKHSLLYEYFTVYNELTKVKYVTEGMRKPAFLSGEQKKAIVDLLFKTNRKVTVKQLKEDYFKKIECFDSVEISGVEDRFNASLGTYHDLLKIIKDKDFLDNEENEDILEDIVLTLTLFEDREMIEERLKTYAHLFDDKVMKQLKRRRYTGWGRLSRKLINGIRDKQSGKTILDFLKSDGFANRNFMQLIHDDSLTFKEDIQKAQVSGQGDSLHEHIANLAGSPAIKKGILQTVKVVDELVKVMGRHKPENIVIEMARENQTTQKGQKNSRERMKRIEEGIKELGSQILKEHPVENTQLQNEKLYLYYLQNGRDMYVDQELDINRLSDYDVDHIVPQSFLKDDSIDNKVLTRSDKNRGKSDNVPSEEVVKKMKNYWRQLLNAKLITQRKFDNLTKAERGGLSELDKAGFIKRQLVETRQITKHVAQILDSRMNTKYDENDKLIREVKVITLKSKLVSDFRKDFQFYKVREINNYHHAHDAYLNAVVGTALSHEYWMRHALTLAKRARDEREVPVGAVLVLNNRVIGEGWNRAIGLHDPTAHAEIMALRQGGLVMQNYRLIDATLYVTFEPCVMCAGAMIHSRIGRVVFGVRNAKTGAAGSLMDVLHYPGMNHRVEITEGILADECAALLCYFFRMPRQVFNAQKKAQSSTDGSSGSSGSETPGTSESATPESSGGSSIKKYPKLESEFVYGDYKVYDVRKMIAKSEQEIGKATAKYFFYSNIMNFFKTEITLANGEIRKRPLIETNGETGEIVWDKGRDFATVRKVLSMPQVNIVKKTEVQTGGFSKESILPKRNSDKLIARKKDWDPKKYGGFDSPTVAYSVLVVAKVEKGKSKKLKSVKELLGITIMERSSFEKNPIDFLEAKGYKEVKKDLIIKLPKYSLFELENGRKRMLASAGELQKGNELALPSKYVNFLYLASHYEKLKGSPEDNEQKQLFVEQHKHYLDEIIEQISEFSKRVILADANLDKVLSAYNKHRDKPIREQAENIIHLFTLTNLGAPAAFKYFDTTIDRKRYTSTKEVLDATLIHQSITGLYETRIDLSQLGGD

SEQ ID NO: 283 - protein, 1421 aa, synthetic construct
  REGION 1..1421: note = 112 delta HNH TadA polypeptide sequence
MDKKYSIGLAIGTNSVGWAVITDEYKVPSKKFKVLGNTDRHSIKKNLIGALLFDSGETAEATRLKRTARRRYTRRKNRICYLQEIFSNEMAKVDDSFFHRLEESFLVEEDKKHERHPIFGNIVDEVAYHEKYPTIYHLRKKLVDSTDKADLRLIYLALAHMIKFRGHFLIEGDLNPDNSDVDKLFIQLVQTYNQLFEENPINASGVDAKAILSARLSKSRRLENLIAQLPGEKKNGLFGNLIALSLGLTPNFKSNFDLAEDAKLQLSKDTYDDDLDNLLAQIGDQYADLFLAAKNLSDAILLSDILRVNTEITKAPLSASMIKRYDEHHQDLTLLKALVRQQLPEKYKEIFFDQSKNGYAGYIDGGASQEEFYKFIKPILEKMDGTEELLVKLNREDLLRKQRTFDNGSIPHQIHLGELHAILRRQEDFYPFLKDNREKIEKILTFRIPYYVGPLARGNSRFAWMTRKSEETITPWNFEEVVDKGASAQSFIERMTNFDKNLPNEKVLPKHSLLYEYFTVYNELTKVKYVTEGMRKPAFLSGEQKKAIVDLLFKTNRKVTVKQLKEDYFKKIECFDSVEISGVEDRFNASLGTYHDLLKIIKDKDFLDNEENEDILEDIVLTLTLFEDREMIEERLKTYAHLFDDKVMKQLKRRRYTGWGRLSRKLINGIRDKQSGKTILDFLKSDGFANRNFMQLIHDDSLTFKEDIQKAQVSGQGDSLHEHIANLAGSPAIKKGILQTVKVVDELVKVMGRHKPENIVIEMARENQTTQKGQKNSRERMKRIEEGIKELGSEVEFSHEYWMRHALTLAKRARDEREVPVGAVLVLNNRVIGEGWNRAIGLHDPTAHAEIMALRQGGLVMQNYRLIDATLYVTFEPCVMCAGAMIHSRIGRVVFGVRNAKTGAAGSLMDVLHYPGMNHRVEITEGILADECAALLCYFFRMPRQVFNAQKKAQSSTDGGLSELDKAGFIKRQLVETRQITKHVAQILDSRMNTKYDENDKLIREVKVITLKSKLVSDFRKDFQFYKVREINNYHHAHDAYLNAVVGTALIKKYPKLESEFVYGDYKVYDVRKMIAKSEQEIGKATAKYFFYSNIMNFFKTEITLANGEIRKRPLIETNGETGEIVWDKGRDFATVRKVLSMPQVNIVKKTEVQTGGFSKESILPKRNSDKLIARKKDWDPKKYGGFDSPTVAYSVLVVAKVEKGKSKKLKSVKELLGITIMERSSFEKNPIDFLEAKGYKEVKKDLIIKLPKYSLFELENGRKRMLASAGELQKGNELALPSKYVNFLYLASHYEKLKGSPEDNEQKQLFVEQHKHYLDEIIEQISEFSKRVILADANLDKVLSAYNKHRDKPIREQAENIIHLFTLTNLGAPAAFKYFDTTIDRKRYTSTKEVLDATLIHQSITGLYETRIDLSQLGGD

SEQ ID NO: 284 - protein, 1552 aa, synthetic construct
  REGION 1..1552: note = 113 N-term single TadA helixtrunc 165-end polypeptide sequence
MSEVEFSHEYWMRHALTLAKRARDEREVPVGAVLVLNNRVIGEGWNRAIGLHDPTAHAEIMALRQGGLVMQNYRLIDATLYVTFEPCVMCAGAMIHSRIGRVVFGVRNAKTGAAGSLMDVLHYPGMNHRVEITEGILADECAALLCYFFRMPRSGGSSGGSSGSETPGTSESATPESSGGSSGGSDKKYSIGLAIGTNSVGWAVITDEYKVPSKKFKVLGNTDRHSIKKNLIGALLFDSGETAEATRLKRTARRRYTRRKNRICYLQEIFSNEMAKVDDSFFHRLEESFLVEEDKKHERHPIFGNIVDEVAYHEKYPTIYHLRKKLVDSTDKADLRLIYLALAHMIKFRGHFLIEGDLNPDNSDVDKLFIQLVQTYNQLFEENPINASGVDAKAILSARLSKSRRLENLIAQLPGEKKNGLFGNLIALSLGLTPNFKSNFDLAEDAKLQLSKDTYDDDLDNLLAQIGDQYADLFLAAKNLSDAILLSDILRVNTEITKAPLSASMIKRYDEHHQDLTLLKALVRQQLPEKYKEIFFDQSKNGYAGYIDGGASQEEFYKFIKPILEKMDGTEELLVKLNREDLLRKQRTFDNGSIPHQIHLGELHAILRRQEDFYPFLKDNREKIEKILTFRIPYYVGPLARGNSRFAWMTRKSEETITPWNFEEVVDKGASAQSFIERMTNFDKNLPNEKVLPKHSLLYEYFTVYNELTKVKYVTEGMRKPAFLSGEQKKAIVDLLFKTNRKVTVKQLKEDYFKKIECFDSVEISGVEDRFNASLGTYHDLLKIIKDKDFLDNEENEDILEDIVLTLTLFEDREMIEERLKTYAHLFDDKVMKQLKRRRYTGWGRLSRKLINGIRDKQSGKTILDFLKSDGFANRNFMQLIHDDSLTFKEDIQKAQVSGQGDSLHEHIANLAGSPAIKKGILQTVKVVDELVKVMGRHKPENIVIEMARENQTTQKGQKNSRERMKRIEEGIKELGSQILKEHPVENTQLQNEKLYLYYLQNGRDMYVDQELDINRLSDYDVDHIVPQSFLKDDSIDNKVLTRSDKNRGKSDNVPSEEVVKKMKNYWRQLLNAKLITQRKFDNLTKAERGGLSELDKAGFIKRQLVETRQITKHVAQILDSRMNTKYDENDKLIREVKVITLKSKLVSDFRKDFQFYKVREINNYHHAHDAYLNAVVGTALIKKYPKLESEFVYGDYKVYDVRKMIAKSEQEIGKATAKYFFYSNIMNFFKTEITLANGEIRKRPLIETNGETGEIVWDKGRDFATVRKVLSMPQVNIVKKTEVQTGGFSKESILPKRNSDKLIARKKDWDPKKYGGFDSPTVAYSVLVVAKVEKGKSKKLKSVKELLGITIMERSSFEKNPIDFLEAKGYKEVKKDLIIKLPKYSLFELENGRKRMLASAGELQKGNELALPSKYVNFLYLASHYEKLKGSPEDNEQKQLFVEQHKHYLDEIIEQISEFSKRVILADANLDKVLSAYNKHRDKPIREQAENIIHLFTLTNLGAPAAFKYFDTTIDRKRYTSTKEVLDATLIHQSITGLYETRIDLSQLGGD

SEQ ID NO: 285 - protein, 1545 aa, synthetic construct
  REGION 1..1545: note = 114 N-term single TadA helixtrunc 165-end delta 59-65 polypeptide sequence
MSEVEFSHEYWMRHALTLAKRARDEREVPVGAVLVLNNRVIGEGWNRTAHAEIMALRQGGLVMQNYRLIDATLYVTFEPCVMCAGAMIHSRIGRVVFGVRNAKTGAAGSLMDVLHYPGMNHRVEITEGILADECAALLCYFFRMPRSGGSSGGSSGSETPGTSESATPESSGGSSGGSDKKYSIGLAIGTNSVGWAVITDEYKVPSKKFKVLGNTDRHSIKKNLIGALLFDSGETAEATRLKRTARRRYTRRKNRICYLQEIFSNEMAKVDDSFFHRLEESFLVEEDKKHERHPIFGNIVDEVAYHEKYPTIYHLRKKLVDSTDKADLRLIYLALAHMIKFRGHFLIEGDLNPDNSDVDKLFIQLVQTYNQLFEENPINASGVDAKAILSARLSKSRRLENLIAQLPGEKKNGLFGNLIALSLGLTPNFKSNFDLAEDAKLQLSKDTYDDDLDNLLAQIGDQYADLFLAAKNLSDAILLSDILRVNTEITKAPLSASMIKRYDEHHQDLTLLKALVRQQLPEKYKEIFFDQSKNGYAGYIDGGASQEEFYKFIKPILEKMDGTEELLVKLNREDLLRKQRTFDNGSIPHQIHLGELHAILRRQEDFYPFLKDNREKIEKILTFRIPYYVGPLARGNSRFAWMTRKSEETITPWNFEEVVDKGASAQSFIERMTNFDKNLPNEKVLPKHSLLYEYFTVYNELTKVKYVTEGMRKPAFLSGEQKKAIVDLLFKTNRKVTVKQLKEDYFKKIECFDSVEISGVEDRFNASLGTYHDLLKIIKDKDFLDNEENEDILEDIVLTLTLFEDREMIEERLKTYAHLFDDKVMKQLKRRRYTGWGRLSRKLINGIRDKQSGKTILDFLKSDGFANRNFMQLIHDDSLTFKEDIQKAQVSGQGDSLHEHIANLAGSPAIKKGILQTVKVVDELVKVMGRHKPENIVIEMARENQTTQKGQKNSRERMKRIEEGIKELGSQILKEHPVENTQLQNEKLYLYYLQNGRDMYVDQELDINRLSDYDVDHIVPQSFLKDDSIDNKVLTRSDKNRGKSDNVPSEEVVKKMKNYWRQLLNAKLITQRKFDNLTKAERGGLSELDKAGFIKRQLVETRQITKHVAQILDSRMNTKYDENDKLIREVKVITLKSKLVSDFRKDFQFYKVREINNYHHAHDAYLNAVVGTALIKKYPKLESEFVYGDYKVYDVRKMIAKSEQEIGKATAKYFFYSNIMNFFKTEITLANGEIRKRPLIETNGETGEIVWDKGRDFATVRKVLSMPQVNIVKKTEVQTGGFSKESILPKRNSDKLIARKKDWDPKKYGGFDSPTVAYSVLVVAKVEKGKSKKLKSVKELLGITIMERSSFEKNPIDFLEAKGYKEVKKDLIIKLPKYSLFELENGRKRMLASAGELQKGNELALPSKYVNFLYLASHYEKLKGSPEDNEQKQLFVEQHKHYLDEIIEQISEFSKRVILADANLDKVLSAYNKHRDKPIREQAENIIHLFTLTNLGAPAAFKYFDTTIDRKRYTSTKEVLDATLIHQSITGLYETRIDLSQLGGD

SEQ ID NO: 286 - protein, 1541 aa, synthetic construct
  REGION 1..1541: note = 115.1 Cas9 TadAins 1004 polypeptide sequence
MDKKYSIGLAIGTNSVGWAVITDEYKVPSKKFKVLGNTDRHSIKKNLIGALLFDSGETAEATRLKRTARRRYTRRKNRICYLQEIFSNEMAKVDDSFFHRLEESFLVEEDKKHERHPIFGNIVDEVAYHEKYPTIYHLRKKLVDSTDKADLRLIYLALAHMIKFRGHFLIEGDLNPDNSDVDKLFIQLVQTYNQLFEENPINASGVDAKAILSARLSKSRRLENLIAQLPGEKKNGLFGNLIALSLGLTPNFKSNFDLAEDAKLQLSKDTYDDDLDNLLAQIGDQYADLFLAAKNLSDAILLSDILRVNTEITKAPLSASMIKRYDEHHQDLTLLKALVRQQLPEKYKEIFFDQSKNGYAGYIDGGASQEEFYKFIKPILEKMDGTEELLVKLNREDLLRKQRTFDNGSIPHQIHLGELHAILRRQEDFYPFLKDNREKIEKILTFRIPYYVGPLARGNSRFAWMTRKSEETITPWNFEEVVDKGASAQSFIERMTNFDKNLPNEKVLPKHSLLYEYFTVYNELTKVKYVTEGMRKPAFLSGEQKKAIVDLLFKTNRKVTVKQLKEDYFKKIECFDSVEISGVEDRFNASLGTYHDLLKIIKDKDFLDNEENEDILEDIVLTLTLFEDREMIEERLKTYAHLFDDKVMKQLKRRRYTGWGRLSRKLINGIRDKQSGKTILDFLKSDGFANRNFMQLIHDDSLTFKEDIQKAQVSGQGDSLHEHIANLAGSPAIKKGILQTVKVVDELVKVMGRHKPENIVIEMARENQTTQKGQKNSRERMKRIEEGIKELGSQILKEHPVENTQLQNEKLYLYYLQNGRDMYVDQELDINRLSDYDVDHIVPQSFLKDDSIDNKVLTRSDKNRGKSDNVPSEEVVKKMKNYWRQLLNAKLITQRKFDNLTKAERGGLSELDKAGFIKRQLVETRQITKHVAQILDSRMNTKYDENDKLIREVKVITLKSKLVSDFRKDFQFYKVREINNYHHAHDAYLNAVVGTALIKKYPKGSSGSETPGTSESATPESSGSEVEFSHEYWMRHALTLAKRARDEREVPVGAVLVLNNRVIGEGWNRAIGLHDPTAHAEIMALRQGGLVMQNYRLIDATLYVTFEPCVMCAGAMIHSRIGRVVFGVRNAKTGAAGSLMDVLHYPGMNHRVEITEGILADECAALLCYFFRMPRQLESEFVYGDYKVYDVRKMIAKSEQEIGKATAKYFFYSNIMNFFKTEITLANGEIRKRPLIETNGETGEIVWDKGRDFATVRKVLSMPQVNIVKKTEVQTGGFSKESILPKRNSDKLIARKKDWDPKKYGGFDSPTVAYSVLVVAKVEKGKSKKLKSVKELLGITIMERSSFEKNPIDFLEAKGYKEVKKDLIIKLPKYSLFELENGRKRMLASAGELQKGNELALPSKYVNFLYLASHYEKLKGSPEDNEQKQLFVEQHKHYLDEIIEQISEFSKRVILADANLDKVLSAYNKHRDKPIREQAENIIHLFTLTNLGAPAAFKYFDTTIDRKRYTSTKEVLDATLIHQSITGLYETRIDLSQLGGD

SEQ ID NO: 287 - protein, 1541 aa, synthetic construct
  REGION 1..1541: note = 115.2 Cas9 TadAins 1005 polypeptide sequence
MDKKYSIGLAIGTNSVGWAVITDEYKVPSKKFKVLGNTDRHSIKKNLIGALLFDSGETAEATRLKRTARRRYTRRKNRICYLQEIFSNEMAKVDDSFFHRLEESFLVEEDKKHERHPIFGNIVDEVAYHEKYPTIYHLRKKLVDSTDKADLRLIYLALAHMIKFRGHFLIEGDLNPDNSDVDKLFIQLVQTYNQLFEENPINASGVDAKAILSARLSKSRRLENLIAQLPGEKKNGLFGNLIALSLGLTPNFKSNFDLAEDAKLQLSKDTYDDDLDNLLAQIGDQYADLFLAAKNLSDAILLSDILRVNTEITKAPLSASMIKRYDEHHQDLTLLKALVRQQLPEKYKEIFFDQSKNGYAGYIDGGASQEEFYKFIKPILEKMDGTEELLVKLNREDLLRKQRTFDNGSIPHQIHLGELHAILRRQEDFYPFLKDNREKIEKILTFRIPYYVGPLARGNSRFAWMTRKSEETITPWNFEEVVDKGASAQSFIERMTNFDKNLPNEKVLPKHSLLYEYFTVYNELTKVKYVTEGMRKPAFLSGEQKKAIVDLLFKTNRKVTVKQLKEDYFKKIECFDSVEISGVEDRFNASLGTYHDLLKIIKDKDFLDNEENEDILEDIVLTLTLFEDREMIEERLKTYAHLFDDKVMKQLKRRRYTGWGRLSRKLINGIRDKQSGKTILDFLKSDGFANRNFMQLIHDDSLTFKEDIQKAQVSGQGDSLHEHIANLAGSPAIKKGILQTVKVVDELVKVMGRHKPENIVIEMARENQTTQKGQKNSRERMKRIEEGIKELGSQILKEHPVENTQLQNEKLYLYYLQNGRDMYVDQELDINRLSDYDVDHIVPQSFLKDDSIDNKVLTRSDKNRGKSDNVPSEEVVKKMKNYWRQLLNAKLITQRKFDNLTKAERGGLSELDKAGFIKRQLVETRQITKHVAQILDSRMNTKYDENDKLIREVKVITLKSKLVSDFRKDFQFYKVREINNYHHAHDAYLNAVVGTALIKKYPKLGSSGSETPGTSESATPESSGSEVEFSHEYWMRHALTLAKRARDEREVPVGAVLVLNNRVIGEGWNRAIGLHDPTAHAEIMALRQGGLVMQNYRLIDATLYVTFEPCVMCAGAMIHSRIGRVVFGVRNAKTGAAGSLMDVLHYPGMNHRVEITEGILADECAALLCYFFRMPRQESEFVYGDYKVYDVRKMIAKSEQEIGKATAKYFFYSNIMNFFKTEITLANGEIRKRPLIETNGETGEIVWDKGRDFATVRKVLSMPQVNIVKKTEVQTGGFSKESILPKRNSDKLIARKKDWDPKKYGGFDSPTVAYSVLVVAKVEKGKSKKLKSVKELLGITIMERSSFEKNPIDFLEAKGYKEVKKDLIIKLPKYSLFELENGRKRMLASAGELQKGNELALPSKYVNFLYLASHYEKLKGSPEDNEQKQLFVEQHKHYLDEIIEQISEFSKRVILADANLDKVLSAYNKHRDKPIREQAENIIHLFTLTNLGAPAAFKYFDTTIDRKRYTSTKEVLDATLIHQSITGLYETRIDLSQLGGD

SEQ ID NO: 288 - protein, 1541 aa, synthetic construct
  REGION 1..1541: note = 115.3 Cas9 TadAins 1006 polypeptide sequence
MDKKYSIGLAIGTNSVGWAVITDEYKVPSKKFKVLGNTDRHSIKKNLIGALLFDSGETAEATRLKRTARRRYTRRKNRICYLQEIFSNEMAKVDDSFFHRLEESFLVEEDKKHERHPIFGNIVDEVAYHEKYPTIYHLRKKLVDSTDKADLRLIYLALAHMIKFRGHFLIEGDLNPDNSDVDKLFIQLVQTYNQLFEENPINASGVDAKAILSARLSKSRRLENLIAQLPGEKKNGLFGNLIALSLGLTPNFKSNFDLAEDAKLQLSKDTYDDDLDNLLAQIGDQYADLFLAAKNLSDAILLSDILRVNTEITKAPLSASMIKRYDEHHQDLTLLKALVRQQLPEKYKEIFFDQSKNGYAGYIDGGASQEEFYKFIKPILEKMDGTEELLVKLNREDLLRKQRTFDNGSIPHQIHLGELHAILRRQEDFYPFLKDNREKIEKILTFRIPYYVGPLARGNSRFAWMTRKSEETITPWNFEEVVDKGASAQSFIERMTNFDKNLPNEKVLPKHSLLYEYFTVYNELTKVKYVTEGMRKPAFLSGEQKKAIVDLLFKTNRKVTVKQLKEDYFKKIECFDSVEISGVEDRFNASLGTYHDLLKIIKDKDFLDNEENEDILEDIVLTLTLFEDREMIEERLKTYAHLFDDKVMKQLKRRRYTGWGRLSRKLINGIRDKQSGKTILDFLKSDGFANRNFMQLIHDDSLTFKEDIQKAQVSGQGDSLHEHIANLAGSPAIKKGILQTVKVVDELVKVMGRHKPENIVIEMARENQTTQKGQKNSRERMKRIEEGIKELGSQILKEHPVENTQLQNEKLYLYYLQNGRDMYVDQELDINRLSDYDVDHIVPQSFLKDDSIDNKVLTRSDKNRGKSDNVPSEEVVKKMKNYWRQLLNAKLITQRKFDNLTKAERGGLSELDKAGFIKRQLVETRQITKHVAQILDSRMNTKYDENDKLIREVKVITLKSKLVSDFRKDFQFYKVREINNYHHAHDAYLNAVVGTALIKKYPKLEGSSGSETPGTSESATPESSGSEVEFSHEYWMRHALTLAKRARDEREVPVGAVLVLNNRVIGEGWNRAIGLHDPTAHAEIMALRQGGLVMQNYRLIDATLYVTFEPCVMCAGAMIHSRIGRVVFGVRNAKTGAAGSLMDVLHYPGMNHRVEITEGILADECAALLCYFFRMPRQSEFVYGDYKVYDVRKMIAKSEQEIGKATAKYFFYSNIMNFFKTEITLANGEIRKRPLIETNGETGEIVWDKGRDFATVRKVLSMPQVNIVKKTEVQTGGFSKESILPKRNSDKLIARKKDWDPKKYGGFDSPTVAYSVLVVAKVEKGKSKKLKSVKELLGITIMERSSFEKNPIDFLEAKGYKEVKKDLIIKLPKYSLFELENGRKRMLASAGELQKGNELALPSKYVNFLYLASHYEKLKGSPEDNEQKQLFVEQHKHYLDEIIEQISEFSKRVILADANLDKVLSAYNKHRDKPIREQAENIIHLFTLTNLGAPAAFKYFDTTIDRKRYTSTKEVLDATLIHQSITGLYETRIDLSQLGGD

SEQ ID NO: 289 - protein, 1541 aa, synthetic construct
  REGION 1..1541: note = 115.4 Cas9 TadAins 1007 polypeptide sequence
MDKKYSIGLAIGTNSVGWAVITDEYKVPSKKFKVLGNTDRHSIKKNLIGALLFDSGETAEATRLKRTARRRYTRRKNRICYLQEIFSNEMAKVDDSFFHRLEESFLVEEDKKHERHPIFGNIVDEVAYHEKYPTIYHLRKKLVDSTDKADLRLIYLALAHMIKFRGHFLIEGDLNPDNSDVDKLFIQLVQTYNQLFEENPINASGVDAKAILSARLSKSRRLENLIAQLPGEKKNGLFGNLIALSLGLTPNFKSNFDLAEDAKLQLSKDTYDDDLDNLLAQIGDQYADLFLAAKNLSDAILLSDILRVNTEITKAPLSASMIKRYDEHHQDLTLLKALVRQQLPEKYKEIFFDQSKNGYAGYIDGGASQEEFYKFIKPILEKMDGTEELLVKLNREDLLRKQRTFDNGSIPHQIHLGELHAILRRQEDFYPFLKDNREKIEKILTFRIPYYVGPLARGNSRFAWMTRKSEETITPWNFEEVVDKGASAQSFIERMTNFDKNLPNEKVLPKHSLLYEYFTVYNELTKVKYVTEGMRKPAFLSGEQKKAIVDLLFKTNRKVTVKQLKEDYFKKIECFDSVEISGVEDRFNASLGTYHDLLKIIKDKDFLDNEENEDILEDIVLTLTLFEDREMIEERLKTYAHLFDDKVMKQLKRRRYTGWGRLSRKLINGIRDKQSGKTILDFLKSDGFANRNFMQLIHDDSLTFKEDIQKAQVSGQGDSLHEHIANLAGSPAIKKGILQTVKVVDELVKVMGRHKPENIVIEMARENQTTQKGQKNSRERMKRIEEGIKELGSQILKEHPVENTQLQNEKLYLYYLQNGRDMYVDQELDINRLSDYDVDHIVPQSFLKDDSIDNKVLTRSDKNRGKSDNVPSEEVVKKMKNYWRQLLNAKLITQRKFDNLTKAERGGLSELDKAGFIKRQLVETRQITKHVAQILDSRMNTKYDENDKLIREVKVITLKSKLVSDFRKDFQFYKVREINNYHHAHDAYLNAVVGTALIKKYPKLESGSSGSETPGTSESATPESSGSEVEFSHEYWMRHALTLAKRARDEREVPVGAVLVLNNRVIGEGWNRAIGLHDPTAHAEIMALRQGGLVMQNYRLIDATLYVTFEPCVMCAGAMIHSRIGRVVFGVRNAKTGAAGSLMDVLHYPGMNHRVEITEGILADECAALLCYFFRMPRQEFVYGDYKVYDVRKMIAKSEQEIGKATAKYFFYSNIMNFFKTEITLANGEIRKRPLIETNGETGEIVWDKGRDFATVRKVLSMPQVNIVKKTEVQTGGFSKESILPKRNSDKLIARKKDWDPKKYGGFDSPTVAYSVLVVAKVEKGKSKKLKSVKELLGITIMERSSFEKNPIDFLEAKGYKEVKKDLIIKLPKYSLFELENGRKRMLASAGELQKGNELALPSKYVNFLYLASHYEKLKGSPEDNEQKQLFVEQHKHYLDEIIEQISEFSKRVILADANLDKVLSAYNKHRDKPIREQAENIIHLFTLTNLGAPAAFKYFDTTIDRKRYTSTKEVLDATLIHQSITGLYETRIDLSQLGGD

SEQ ID NO: 290 - protein, 1541 aa, synthetic construct
  REGION 1..1541: note = 116.1 Cas9 TadAins C-term truncate 792 polypeptide sequence
MDKKYSIGLAIGTNSVGWAVITDEYKVPSKKFKVLGNTDRHSIKKNLIGALLFDSGETAEATRLKRTARRRYTRRKNRICYLQEIFSNEMAKVDDSFFHRLEESFLVEEDKKHERHPIFGNIVDEVAYHEKYPTIYHLRKKLVDSTDKADLRLIYLALAHMIKFRGHFLIEGDLNPDNSDVDKLFIQLVQTYNQLFEENPINASGVDAKAILSARLSKSRRLENLIAQLPGEKKNGLFGNLIALSLGLTPNFKSNFDLAEDAKLQLSKDTYDDDLDNLLAQIGDQYADLFLAAKNLSDAILLSDILRVNTEITKAPLSASMIKRYDEHHQDLTLLKALVRQQLPEKYKEIFFDQSKNGYAGYIDGGASQEEFYKFIKPILEKMDGTEELLVKLNREDLLRKQRTFDNGSIPHQIHLGELHAILRRQEDFYPFLKDNREKIEKILTFRIPYYVGPLARGNSRFAWMTRKSEETITPWNFEEVVDKGASAQSFIERMTNFDKNLPNEKVLPKHSLLYEYFTVYNELTKVKYVTEGMRKPAFLSGEQKKAIVDLLFKTNRKVTVKQLKEDYFKKIECFDSVEISGVEDRFNASLGTYHDLLKIIKDKDFLDNEENEDILEDIVLTLTLFEDREMIEERLKTYAHLFDDKVMKQLKRRRYTGWGRLSRKLINGIRDKQSGKTILDFLKSDGFANRNFMQLIHDDSLTFKEDIQKAQVSGQGDSLHEHIANLAGSPAIKKGILQTVKVVDELVKVMGRHKPENIVIEMARENQTTQKGQKNSRERMKRIEEGIKELGGSSGSETPGTSESATPESSGSEVEFSHEYWMRHALTLAKRARDEREVPVGAVLVLNNRVIGEGWNRAIGLHDPTAHAEIMALRQGGLVMQNYRLIDATLYVTFEPCVMCAGAMIHSRIGRVVFGVRNAKTGAAGSLMDVLHYPGMNHRVEITEGILADECAALLCYFFRMPRQSQILKEHPVENTQLQNEKLYLYYLQNGRDMYVDQELDINRLSDYDVDHIVPQSFLKDDSIDNKVLTRSDKNRGKSDNVPSEEVVKKMKNYWRQLLNAKLITQRKFDNLTKAERGGLSELDKAGFIKRQLVETRQITKHVAQILDSRMNTKYDENDKLIREVKVITLKSKLVSDFRKDFQFYKVREINNYHHAHDAYLNAVVGTALIKKYPKLESEFVYGDYKVYDVRKMIAKSEQEIGKATAKYFFYSNIMNFFKTEITLANGEIRKRPLIETNGETGEIVWDKGRDFATVRKVLSMPQVNIVKKTEVQTGGFSKESILPKRNSDKLIARKKDWDPKKYGGFDSPTVAYSVLVVAKVEKGKSKKLKSVKELLGITIMERSSFEKNPIDFLEAKGYKEVKKDLIIKLPKYSLFELENGRKRMLASAGELQKGNELALPSKYVNFLYLASHYEKLKGSPEDNEQKQLFVEQHKHYLDEIIEQISEFSKRVILADANLDKVLSAYNKHRDKPIREQAENIIHLFTLTNLGAPAAFKYFDTTIDRKRYTSTKEVLDATLIHQSITGLYETRIDLSQLGGD

SEQ ID NO: 291 - protein, 1541 aa, synthetic construct
  REGION 1..1541: note = 116.2 Cas9 TadAins C-term truncate 791 polypeptide sequence
MDKKYSIGLAIGTNSVGWAVITDEYKVPSKKFKVLGNTDRHSIKKNLIGALLFDSGETAEATRLKRTARRRYTRRKNRICYLQEIFSNEMAKVDDSFFHRLEESFLVEEDKKHERHPIFGNIVDEVAYHEKYPTIYHLRKKLVDSTDKADLRLIYLALAHMIKFRGHFLIEGDLNPDNSDVDKLFIQLVQTYNQLFEENPINASGVDAKAILSARLSKSRRLENLIAQLPGEKKNGLFGNLIALSLGLTPNFKSNFDLAEDAKLQLSKDTYDDDLDNLLAQIGDQYADLFLAAKNLSDAILLSDILRVNTEITKAPLSASMIKRYDEHHQDLTLLKALVRQQLPEKYKEIFFDQSKNGYAGYIDGGASQEEFYKFIKPILEKMDGTEELLVKLNREDLLRKQRTFDNGSIPHQIHLGELHAILRRQEDFYPFLKDNREKIEKILTFRIPYYVGPLARGNSRFAWMTRKSEETITPWNFEEVVDKGASAQSFIERMTNFDKNLPNEKVLPKHSLLYEYFTVYNELTKVKYVTEGMRKPAFLSGEQKKAIVDLLFKTNRKVTVKQLKEDYFKKIECFDSVEISGVEDRFNASLGTYHDLLKIIKDKDFLDNEENEDILEDIVLTLTLFEDREMIEERLKTYAHLFDDKVMKQLKRRRYTGWGRLSRKLINGIRDKQSGKTILDFLKSDGFANRNFMQLIHDDSLTFKEDIQKAQVSGQGDSLHEHIANLAGSPAIKKGILQTVKVVDELVKVMGRHKPENIVIEMARENQTTQKGQKNSRERMKRIEEGIKELGSSGSETPGTSESATPESSGSEVEFSHEYWMRHALTLAKRARDEREVPVGAVLVLNNRVIGEGWNRAIGLHDPTAHAEIMALRQGGLVMQNYRLIDATLYVTFEPCVMCAGAMIHSRIGRVVFGVRNAKTGAAGSLMDVLHYPGMNHRVEITEGILADECAALLCYFFRMPRQGSQILKEHPVENTQLQNEKLYLYYLQNGRDMYVDQELDINRLSDYDVDHIVPQSFLKDDSIDNKVLTRSDKNRGKSDNVPSEEVVKKMKNYWRQLLNAKLITQRKFDNLTKAERGGLSELDKAGFIKRQLVETRQITKHVAQILDSRMNTKYDENDKLIREVKVITLKSKLVSDFRKDFQFYKVREINNYHHAHDAYLNAVVGTALIKKYPKLESEFVYGDYKVYDVRKMIAKSEQEIGKATAKYFFYSNIMNFFKTEITLANGEIRKRPLIETNGETGEIVWDKGRDFATVRKVLSMPQVNIVKKTEVQTGGFSKESILPKRNSDKLIARKKDWDPKKYGGFDSPTVAYSVLVVAKVEKGKSKKLKSVKELLGITIMERSSFEKNPIDFLEAKGYKEVKKDLIIKLPKYSLFELENGRKRMLASAGELQKGNELALPSKYVNFLYLASHYEKLKGSPEDNEQKQLFVEQHKHYLDEIIEQISEFSKRVILADANLDKVLSAYNKHRDKPIREQAENIIHLFTLTNLGAPAAFKYFDTTIDRKRYTSTKEVLDATLIHQSITGLYETRIDLSQLGGD

SEQ ID NO: 292 - protein, 1541 aa, synthetic construct
  REGION 1..1541: note = 116.3 Cas9 TadAins C-term truncate 790 polypeptide sequence
MDKKYSIGLAIGTNSVGWAVITDEYKVPSKKFKVLGNTDRHSIKKNLIGALLFDSGETAEATRLKRTARRRYTRRKNRICYLQEIFSNEMAKVDDSFFHRLEESFLVEEDKKHERHPIFGNIVDEVAYHEKYPTIYHLRKKLVDSTDKADLRLIYLALAHMIKFRGHFLIEGDLNPDNSDVDKLFIQLVQTYNQLFEENPINASGVDAKAILSARLSKSRRLENLIAQLPGEKKNGLFGNLIALSLGLTPNFKSNFDLAEDAKLQLSKDTYDDDLDNLLAQIGDQYADLFLAAKNLSDAILLSDILRVNTEITKAPLSASMIKRYDEHHQDLTLLKALVRQQLPEKYKEIFFDQSKNGYAGYIDGGASQEEFYKFIKPILEKMDGTEELLVKLNREDLLRKQRTFDNGSIPHQIHLGELHAILRRQEDFYPFLKDNREKIEKILTFRIPYYVGPLARGNSRFAWMTRKSEETITPWNFEEVVDKGASAQSFIERMTNFDKNLPNEKVLPKHSLLYEYFTVYNELTKVKYVTEGMRKPAFLSGEQKKAIVDLLFKTNRKVTVKQLKEDYFKKIECFDSVEISGVEDRFNASLGTYHDLLKIIKDKDFLDNEENEDILEDIVLTLTLFEDREMIEERLKTYAHLFDDKVMKQLKRRRYTGWGRLSRKLINGIRDKQSGKTILDFLKSDGFANRNFMQLIHDDSLTFKEDIQKAQVSGQGDSLHEHIANLAGSPAIKKGILQTVKVVDELVKVMGRHKPENIVIEMARENQTTQKGQKNSRERMKRIEEGIKEGSSGSETPGTSESATPESSGSEVEFSHEYWMRHALTLAKRARDEREVPVGAVLVLNNRVIGEGWNRAIGLHDPTAHAEIMALRQGGLVMQNYRLIDATLYVTFEPCVMCAGAMIHSRIGRVVFGVRNAKTGAAGSLMDVLHYPGMNHRVEITEGILADECAALLCYFFRMPRQLGSQILKEHPVENTQLQNEKLYLYYLQNGRDMYVDQELDINRLSDYDVDHIVPQSFLKDDSIDNKVLTRSDKNRGKSDNVPSEEVVKKMKNYWRQLLNAKLITQRKFDNLTKAERGGLSELDKAGFIKRQLVETRQITKHVAQILDSRMNTKYDENDKLIREVKVITLKSKLVSDFRKDFQFYKVREINNYHHAHDAYLNAVVGTALIKKYPKLESEFVYGDYKVYDVRKMIAKSEQEIGKATAKYFFYSNIMNFFKTEITLANGEIRKRPLIETNGETGEIVWDKGRDFATVRKVLSMPQVNIVKKTEVQTGGFSKESILPKRNSDKLIARKKDWDPKKYGGFDSPTVAYSVLVVAKVEKGKSKKLKSVKELLGITIMERSSFEKNPIDFLEAKGYKEVKKDLIIKLPKYSLFELENGRKRMLASAGELQKGNELALPSKYVNFLYLASHYEKLKGSPEDNEQKQLFVEQHKHYLDEIIEQISEFSKRVILADANLDKVLSAYNKHRDKPIREQAENIIHLFTLTNLGAPAAFKYFDTTIDRKRYTSTKEVLDATLIHQSITGLYETRIDLSQLGGD

SEQ ID NO: 293 - protein, 1484 aa, synthetic construct
  REGION 1..1484: note = 117 Cas9 delta 1017-1069 polypeptide sequence
MDKKYSIGLAIGTNSVGWAVITDEYKVPSKKFKVLGNTDRHSIKKNLIGALLFDSGETAEATRLKRTARRRYTRRKNRICYLQEIFSNEMAKVDDSFFHRLEESFLVEEDKKHERHPIFGNIVDEVAYHEKYPTIYHLRKKLVDSTDKADLRLIYLALAHMIKFRGHFLIEGDLNPDNSDVDKLFIQLVQTYNQLFEENPINASGVDAKAILSARLSKSRRLENLIAQLPGEKKNGLFGNLIALSLGLTPNFKSNFDLAEDAKLQLSKDTYDDDLDNLLAQIGDQYADLFLAAKNLSDAILLSDILRVNTEITKAPLSASMIKRYDEHHQDLTLLKALVRQQLPEKYKEIFFDQSKNGYAGYIDGGASQEEFYKFIKPILEKMDGTEELLVKLNREDLLRKQRTFDNGSIPHQIHLGELHAILRRQEDFYPFLKDNREKIEKILTFRIPYYVGPLARGNSRFAWMTRKSEETITPWNFEEVVDKGASAQSFIERMTNFDKNLPNEKVLPKHSLLYEYFTVYNELTKVKYVTEGMRKPAFLSGEQKKAIVDLLFKTNRKVTVKQLKEDYFKKIECFDSVEISGVEDRFNASLGTYHDLLKIIKDKDFLDNEENEDILEDIVLTLTLFEDREMIEERLKTYAHLFDDKVMKQLKRRRYTGWGRLSRKLINGIRDKQSGKTILDFLKSDGFANRNFMQLIHDDSLTFKEDIQKAQVSGQGDSLHEHIANLAGSPAIKKGILQTVKVVDELVKVMGRHKPENIVIEMARENQTTQKGQKNSRERMKRIEEGIKELGSQILKEHPVENTQLQNEKLYLYYLQNGRDMYVDQELDINRLSDYDVDHIVPQSFLKDDSIDNKVLTRSDKNRGKSDNVPSEEVVKKMKNYWRQLLNAKLITQRKFDNLTKAERGGLSELDKAGFIKRQLVETRQITKHVAQILDSRMNTKYDENDKLIREVKVITLKSKLVSDFRKDFQFYKVREINNYHHAHDAYLNAVVGTALIKKYPKLESEFVYGDYKVYSSGSEVEFSHEYWMRHALTLAKRARDEREVPVGAVLVLNNRVIGEGWNRAIGLHDPTAHAEIMALRQGGLVMQNYRLIDATLYVTFEPCVMCAGAMIHSRIGRVVFGVRNAKTGAAGSLMDVLHYPGMNHRVEITEGILADECAALLCYFFRMPRQVFNAQKKAQSSTDGEIVWDKGRDFATVRKVLSMPQVNIVKKTEVQTGGFSKESILPKRNSDKLIARKKDWDPKKYGGFDSPTVAYSVLVVAKVEKGKSKKLKSVKELLGITIMERSSFEKNPIDFLEAKGYKEVKKDLIIKLPKYSLFELENGRKRMLASAGELQKGNELALPSKYVNFLYLASHYEKLKGSPEDNEQKQLFVEQHKHYLDEIIEQISEFSKRVILADANLDKVLSAYNKHRDKPIREQAENIIHLFTLTNLGAPAAFKYFDTTIDRKRYTSTKEVLDATLIHQSITGLYETRIDLSQLGGD

SEQ ID NO: 294 - protein, 1554 aa, synthetic construct
  REGION 1..1554: note = 118 Cas9 TadA-CP116ins 1067 polypeptide sequence
MDKKYSIGLAIGTNSVGWAVITDEYKVPSKKFKVLGNTDRHSIKKNLIGALLFDSGETAEATRLKRTARRRYTRRKNRICYLQEIFSNEMAKVDDSFFHRLEESFLVEEDKKHERHPIFGNIVDEVAYHEKYPTIYHLRKKLVDSTDKADLRLIYLALAHMIKFRGHFLIEGDLNPDNSDVDKLFIQLVQTYNQLFEENPINASGVDAKAILSARLSKSRRLENLIAQLPGEKKNGLFGNLIALSLGLTPNFKSNFDLAEDAKLQLSKDTYDDDLDNLLAQIGDQYADLFLAAKNLSDAILLSDILRVNTEITKAPLSASMIKRYDEHHQDLTLLKALVRQQLPEKYKEIFFDQSKNGYAGYIDGGASQEEFYKFIKPILEKMDGTEELLVKLNREDLLRKQRTFDNGSIPHQIHLGELHAILRRQEDFYPFLKDNREKIEKILTFRIPYYVGPLARGNSRFAWMTRKSEETITPWNFEEVVDKGASAQSFIERMTNFDKNLPNEKVLPKHSLLYEYFTVYNELTKVKYVTEGMRKPAFLSGEQKKAIVDLLFKTNRKVTVKQLKEDYFKKIECFDSVEISGVEDRFNASLGTYHDLLKIIKDKDFLDNEENEDILEDIVLTLTLFEDREMIEERLKTYAHLFDDKVMKQLKRRRYTGWGRLSRKLINGIRDKQSGKTILDFLKSDGFANRNFMQLIHDDSLTFKEDIQKAQVSGQGDSLHEHIANLAGSPAIKKGILQTVKVVDELVKVMGRHKPENIVIEMARENQTTQKGQKNSRERMKRIEEGIKELGSQILKEHPVENTQLQNEKLYLYYLQNGRDMYVDQELDINRLSDYDVDHIVPQSFLKDDSIDNKVLTRSDKNRGKSDNVPSEEVVKKMKNYWRQLLNAKLITQRKFDNLTKAERGGLSELDKAGFIKRQLVETRQITKHVAQILDSRMNTKYDENDKLIREVKVITLKSKLVSDFRKDFQFYKVREINNYHHAHDAYLNAVVGTALIKKYPKLESEFVYGDYKVYDVRKMIAKSEQEIGKATAKYFFYSNIMNFFKTEITLANGEIRKRPLIETNMNHRVEITEGILADECAALLCYFFRMPRQVFNAQKKAQSSTDGSSGSETPGTSESATPESSGSEVEFSHEYWMRHALTLAKRARDEREVPVGAVLVLNNRVIGEGWNRAIGLHDPTAHAEIMALRQGGLVMQNYRLIDATLYVTFEPCVMCAGAMIHSRIGRVVFGVRNAKTGAAGSLMDVLHYPGGETGEIVWDKGRDFATVRKVLSMPQVNIVKKTEVQTGGFSKESILPKRNSDKLIARKKDWDPKKYGGFDSPTVAYSVLVVAKVEKGKSKKLKSVKELLGITIMERSSFEKNPIDFLEAKGYKEVKKDLIIKLPKYSLFELENGRKRMLASAGELQKGNELALPSKYVNFLYLASHYEKLKGSPEDNEQKQLFVEQHKHYLDEIIEQISEFSKRVILADANLDKVLSAYNKHRDKPIREQAENIIHLFTLTNLGAPAAFKYFDTTIDRKRYTSTKEVLDATLIHQSITGLYETRIDLSQLGGD

SEQ ID NO: 295 - protein, 1554 aa, synthetic construct
  REGION 1..1554: note = 119 Cas9 TadAins 701 polypeptide sequence
MDKKYSIGLAIGTNSVGWAVITDEYKVPSKKFKVLGNTDRHSIKKNLIGALLFDSGETAEATRLKRTARRRYTRRKNRICYLQEIFSNEMAKVDDSFFHRLEESFLVEEDKKHERHPIFGNIVDEVAYHEKYPTIYHLRKKLVDSTDKADLRLIYLALAHMIKFRGHFLIEGDLNPDNSDVDKLFIQLVQTYNQLFEENPINASGVDAKAILSARLSKSRRLENLIAQLPGEKKNGLFGNLIALSLGLTPNFKSNFDLAEDAKLQLSKDTYDDDLDNLLAQIGDQYADLFLAAKNLSDAILLSDILRVNTEITKAPLSASMIKRYDEHHQDLTLLKALVRQQLPEKYKEIFFDQSKNGYAGYIDGGASQEEFYKFIKPILEKMDGTEELLVKLNREDLLRKQRTFDNGSIPHQIHLGELHAILRRQEDFYPFLKDNREKIEKILTFRIPYYVGPLARGNSRFAWMTRKSEETITPWNFEEVVDKGASAQSFIERMTNFDKNLPNEKVLPKHSLLYEYFTVYNELTKVKYVTEGMRKPAFLSGEQKKAIVDLLFKTNRKVTVKQLKEDYFKKIECFDSVEISGVEDRFNASLGTYHDLLKIIKDKDFLDNEENEDILEDIVLTLTLFEDREMIEERLKTYAHLFDDKVMKQLKRRRYTGWGRLSRKLINGIRDKQSGKTILDFLKSDGFANRNFMQLIHDDSGSSGSETPGTSESATPESSGSEVEFSHEYWMRHALTLAKRARDEREVPVGAVLVLNNRVIGEGWNRAIGLHDPTAHAEIMALRQGGLVMQNYRLIDATLYVTFEPCVMCAGAMIHSRIGRVVFGVRNAKTGAAGSLMDVLHYPGMNHRVEITEGILADECAALLCYFFRMPRQVFNAQKKAQSSTDLTFKEDIQKAQVSGQGDSLHEHIANLAGSPAIKKGILQTVKVVDELVKVMGRHKPENIVIEMARENQTTQKGQKNSRERMKRIEEGIKELGSQILKEHPVENTQLQNEKLYLYYLQNGRDMYVDQELDINRLSDYDVDHIVPQSFLKDDSIDNKVLTRSDKNRGKSDNVPSEEVVKKMKNYWRQLLNAKLITQRKFDNLTKAERGGLSELDKAGFIKRQLVETRQITKHVAQILDSRMNTKYDENDKLIREVKVITLKSKLVSDFRKDFQFYKVREINNYHHAHDAYLNAVVGTALIKKYPKLESEFVYGDYKVYDVRKMIAKSEQEIGKATAKYFFYSNIMNFFKTEITLANGEIRKRPLIETNGETGEIVWDKGRDFATVRKVLSMPQVNIVKKTEVQTGGFSKESILPKRNSDKLIARKKDWDPKKYGGFDSPTVAYSVLVVAKVEKGKSKKLKSVKELLGITIMERSSFEKNPIDFLEAKGYKEVKKDLIIKLPKYSLFELENGRKRMLASAGELQKGNELALPSKYVNFLYLASHYEKLKGSPEDNEQKQLFVEQHKHYLDEIIEQISEFSKRVILADANLDKVLSAYNKHRDKPIREQAENIIHLFTLTNLGAPAAFKYFDTTIDRKRYTSTKEVLDATLIHQSITGLYETRIDLSQLGGD

SEQ ID NO: 296 - protein, 1554 aa, synthetic construct
  REGION 1..1554: note = 120 Cas9 TadACP136ins 1248 polypeptide sequence
MDKKYSIGLAIGTNSVGWAVITDEYKVPSKKFKVLGNTDRHSIKKNLIGALLFDSGETAEATRLKRTARRRYTRRKNRICYLQEIFSNEMAKVDDSFFHRLEESFLVEEDKKHERHPIFGNIVDEVAYHEKYPTIYHLRKKLVDSTDKADLRLIYLALAHMIKFRGHFLIEGDLNPDNSDVDKLFIQLVQTYNQLFEENPINASGVDAKAILSARLSKSRRLENLIAQLPGEKKNGLFGNLIALSLGLTPNFKSNFDLAEDAKLQLSKDTYDDDLDNLLAQIGDQYADLFLAAKNLSDAILLSDILRVNTEITKAPLSASMIKRYDEHHQDLTLLKALVRQQLPEKYKEIFFDQSKNGYAGYIDGGASQEEFYKFIKPILEKMDGTEELLVKLNREDLLRKQRTFDNGSIPHQIHLGELHAILRRQEDFYPFLKDNREKIEKILTFRIPYYVGPLARGNSRFAWMTRKSEETITPWNFEEVVDKGASAQSFIERMTNFDKNLPNEKVLPKHSLLYEYFTVYNELTKVKYVTEGMRKPAFLSGEQKKAIVDLLFKTNRKVTVKQLKEDYFKKIECFDSVEISGVEDRFNASLGTYHDLLKIIKDKDFLDNEENEDILEDIVLTLTLFEDREMIEERLKTYAHLFDDKVMKQLKRRRYTGWGRLSRKLINGIRDKQSGKTILDFLKSDGFANRNFMQLIHDDSLTFKEDIQKAQVSGQGDSLHEHIANLAGSPAIKKGILQTVKVVDELVKVMGRHKPENIVIEMARENQTTQKGQKNSRERMKRIEEGIKELGSQILKEHPVENTQLQNEKLYLYYLQNGRDMYVDQELDINRLSDYDVDHIVPQSFLKDDSIDNKVLTRSDKNRGKSDNVPSEEVVKKMKNYWRQLLNAKLITQRKFDNLTKAERGGLSELDKAGFIKRQLVETRQITKHVAQILDSRMNTKYDENDKLIREVKVITLKSKLVSDFRKDFQFYKVREINNYHHAHDAYLNAVVGTALIKKYPKLESEFVYGDYKVYDVRKMIAKSEQEIGKATAKYFFYSNIMNFFKTEITLANGEIRKRPLIETNGETGEIVWDKGRDFATVRKVLSMPQVNIVKKTEVQTGGFSKESILPKRNSDKLIARKKDWDPKKYGGFDSPTVAYSVLVVAKVEKGKSKKLKSVKELLGITIMERSSFEKNPIDFLEAKGYKEVKKDLIIKLPKYSLFELENGRKRMLASAGELQKGNELALPSKYVNFLYLASHYEKLKGSMNHRVEITEGILADECAALLCYFFRMPRQVFNAQKKAQSSTDGSSGSETPGTSESATPESSGSEVEFSHEYWMRHALTLAKRARDEREVPVGAVLVLNNRVIGEGWNRAIGLHDPTAHAEIMALRQGGLVMQNYRLIDATLYVTFEPCVMCAGAMIHSRIGRVVFGVRNAKTGAAGSLMDVLHYPGPEDNEQKQLFVEQHKHYLDEIIEQISEFSKRVILADANLDKVLSAYNKHRDKPIREQAENIIHLFTLTNLGAPAAFKYFDTTIDRKRYTSTKEVLDATLIHQSITGLYETRIDLSQLGGD

SEQ ID NO: 297 - protein, 1554 aa, synthetic construct
  REGION 1..1554: note = 121 Cas9 TadACP136ins 1052 polypeptide sequence
MDKKYSIGLAIGTNSVGWAVITDEYKVPSKKFKVLGNTDRHSIKKNLIGALLFDSGETAEATRLKRTARRRYTRRKNRICYLQEIFSNEMAKVDDSFFHRLEESFLVEEDKKHERHPIFGNIVDEVAYHEKYPTIYHLRKKLVDSTDKADLRLIYLALAHMIKFRGHFLIEGDLNPDNSDVDKLFIQLVQTYNQLFEENPINASGVDAKAILSARLSKSRRLENLIAQLPGEKKNGLFGNLIALSLGLTPNFKSNFDLAEDAKLQLSKDTYDDDLDNLLAQIGDQYADLFLAAKNLSDAILLSDILRVNTEITKAPLSASMIKRYDEHHQDLTLLKALVRQQLPEKYKEIFFDQSKNGYAGYIDGGASQEEFYKFIKPILEKMDGTEELLVKLNREDLLRKQRTFDNGSIPHQIHLGELHAILRRQEDFYPFLKDNREKIEKILTFRIPYYVGPLARGNSRFAWMTRKSEETITPWNFEEVVDKGASAQSFIERMTNFDKNLPNEKVLPKHSLLYEYFTVYNELTKVKYVTEGMRKPAFLSGEQKKAIVDLLFKTNRKVTVKQLKEDYFKKIECFDSVEISGVEDRFNASLGTYHDLLKIIKDKDFLDNEENEDILEDIVLTLTLFEDREMIEERLKTYAHLFDDKVMKQLKRRRYTGWGRLSRKLINGIRDKQSGKTILDFLKSDGFANRNFMQLIHDDSLTFKEDIQKAQVSGQGDSLHEHIANLAGSPAIKKGILQTVKVVDELVKVMGRHKPENIVIEMARENQTTQKGQKNSRERMKRIEEGIKELGSQILKEHPVENTQLQNEKLYLYYLQNGRDMYVDQELDINRLSDYDVDHIVPQSFLKDDSIDNKVLTRSDKNRGKSDNVPSEEVVKKMKNYWRQLLNAKLITQRKFDNLTKAERGGLSELDKAGFIKRQLVETRQITKHVAQILDSRMNTKYDENDKLIREVKVITLKSKLVSDFRKDFQFYKVREINNYHHAHDAYLNAVVGTALIKKYPKLESEFVYGDYKVYDVRKMIAKSEQEIGKATAKYFFYSNIMNFFKTEITLAMNHRVEITEGILADECAALLCYFFRMPRQVFNAQKKAQSSTDGSSGSETPGTSESATPESSGSEVEFSHEYWMRHALTLAKRARDEREVPVGAVLVLNNRVIGEGWNRAIGLHDPTAHAEIMALRQGGLVMQNYRLIDATLYVTFEPCVMCAGAMIHSRIGRVVFGVRNAKTGAAGSLMDVLHYPGNGEIRKRPLIETNGETGEIVWDKGRDFATVRKVLSMPQVNIVKKTEVQTGGFSKESILPKRNSDKLIARKKDWDPKKYGGFDSPTVAYSVLVVAKVEKGKSKKLKSVKELLGITIMERSSFEKNPIDFLEAKGYKEVKKDLIIKLPKYSLFELENGRKRMLASAGELQKGNELALPSKYVNFLYLASHYEKLKGSPEDNEQKQLFVEQHKHYLDEIIEQISEFSKRVILADANLDKVLSAYNKHRDKPIREQAENIIHLFTLTNLGAPAAFKYFDTTIDRKRYTSTKEVLDATLIHQSITGLYETRIDLSQLGGD

SEQ ID NO: 298 - protein, 1554 aa, synthetic construct
  REGION 1..1554: note = 122 Cas9 TadACP136ins 1041 polypeptide sequence
MDKKYSIGLAIGTNSVGWAVITDEYKVPSKKFKVLGNTDRHSIKKNLIGALLFDSGETAEATRLKRTARRRYTRRKNRICYLQEIFSNEMAKVDDSFFHRLEESFLVEEDKKHERHPIFGNIVDEVAYHEKYPTIYHLRKKLVDSTDKADLRLIYLALAHMIKFRGHFLIEGDLNPDNSDVDKLFIQLVQTYNQLFEENPINASGVDAKAILSARLSKSRRLENLIAQLPGEKKNGLFGNLIALSLGLTPNFKSNFDLAEDAKLQLSKDTYDDDLDNLLAQIGDQYADLFLAAKNLSDAILLSDILRVNTEITKAPLSASMIKRYDEHHQDLTLLKALVRQQLPEKYKEIFFDQSKNGYAGYIDGGASQEEFYKFIKPILEKMDGTEELLVKLNREDLLRKQRTFDNGSIPHQIHLGELHAILRRQEDFYPFLKDNREKIEKILTFRIPYYVGPLARGNSRFAWMTRKSEETITPWNFEEVVDKGASAQSFIERMTNFDKNLPNEKVLPKHSLLYEYFTVYNELTKVKYVTEGMRKPAFLSGEQKKAIVDLLFKTNRKVTVKQLKEDYFKKIECFDSVEISGVEDRFNASLGTYHDLLKIIKDKDFLDNEENEDILEDIVLTLTLFEDREMIEERLKTYAHLFDDKVMKQLKRRRYTGWGRLSRKLINGIRDKQSGKTILDFLKSDGFANRNFMQLIHDDSLTFKEDIQKAQVSGQGDSLHEHIANLAGSPAIKKGILQTVKVVDELVKVMGRHKPENIVIEMARENQTTQKGQKNSRERMKRIEEGIKELGSQILKEHPVENTQLQNEKLYLYYLQNGRDMYVDQELDINRLSDYDVDHIVPQSFLKDDSIDNKVLTRSDKNRGKSDNVPSEEVVKKMKNYWRQLLNAKLITQRKFDNLTKAERGGLSELDKAGFIKRQLVETRQITKHVAQILDSRMNTKYDENDKLIREVKVITLKSKLVSDFRKDFQFYKVREINNYHHAHDAYLNAVVGTALIKKYPKLESEFVYGDYKVYDVRKMIAKSEQEIGKATAKYFFYSMNHRVEITEGILADECAALLCYFFRMPRQVFNAQKKAQSSTDGSSGSETPGTSESATPESSGSEVEFSHEYWMRHALTLAKRARDEREVPVGAVLVLNNRVIGEGWNRAIGLHDPTAHAEIMALRQGGLVMQNYRLIDATLYVTFEPCVMCAGAMIHSRIGRVVFGVRNAKTGAAGSLMDVLHYPGNIMNFFKTEITLANGEIRKRPLIETNGETGEIVWDKGRDFATVRKVLSMPQVNIVKKTEVQTGGFSKESILPKRNSDKLIARKKDWDPKKYGGFDSPTVAYSVLVVAKVEKGKSKKLKSVKELLGITIMERSSFEKNPIDFLEAKGYKEVKKDLIIKLPKYSLFELENGRKRMLASAGELQKGNELALPSKYVNFLYLASHYEKLKGSPEDNEQKQLFVEQHKHYLDEIIEQISEFSKRVILADANLDKVLSAYNKHRDKPIREQAENIIHLFTLTNLGAPAAFKYFDTTIDRKRYTSTKEVLDATLIHQSITGLYETRIDLSQLGGD

SEQ ID NO: 299 - protein, 1554 aa, synthetic construct
  REGION 1..1554: note = 123 Cas9 TadACP139ins 1299 polypeptide sequence
MDKKYSIGLAIGTNSVGWAVITDEYKVPSKKFKVLGNTDRHSIKKNLIGALLFDSGETAEATRLKRTARRRYTRRKNRICYLQEIFSNEMAKVDDSFFHRLEESFLVEEDKKHERHPIFGNIVDEVAYHEKYPTIYHLRKKLVDSTDKADLRLIYLALAHMIKFRGHFLIEGDLNPDNSDVDKLFIQLVQTYNQLFEENPINASGVDAKAILSARLSKSRRLENLIAQLPGEKKNGLFGNLIALSLGLTPNFKSNFDLAEDAKLQLSKDTYDDDLDNLLAQIGDQYADLFLAAKNLSDAILLSDILRVNTEITKAPLSASMIKRYDEHHQDLTLLKALVRQQLPEKYKEIFFDQSKNGYAGYIDGGASQEEFYKFIKPILEKMDGTEELLVKLNREDLLRKQRTFDNGSIPHQIHLGELHAILRRQEDFYPFLKDNREKIEKILTFRIPYYVGPLARGNSRFAWMTRKSEETITPWNFEEVVDKGASAQSFIERMTNFDKNLPNEKVLPKHSLLYEYFTVYNELTKVKYVTEGMRKPAFLSGEQKKAIVDLLFKTNRKVTVKQLKEDYFKKIECFDSVEISGVEDRFNASLGTYHDLLKIIKDKDFLDNEENEDILEDIVLTLTLFEDREMIEERLKTYAHLFDDKVMKQLKRRRYTGWGRLSRKLINGIRDKQSGKTILDFLKSDGFANRNFMQLIHDDSLTFKEDIQKAQVSGQGDSLHEHIANLAGSPAIKKGILQTVKVVDELVKVMGRHKPENIVIEMARENQTTQKGQKNSRERMKRIEEGIKELGSQILKEHPVENTQLQNEKLYLYYLQNGRDMYVDQELDINRLSDYDVDHIVPQSFLKDDSIDNKVLTRSDKNRGKSDNVPSEEVVKKMKNYWRQLLNAKLITQRKFDNLTKAERGGLSELDKAGFIKRQLVETRQITKHVAQILDSRMNTKYDENDKLIREVKVITLKSKLVSDFRKDFQFYKVREINNYHHAHDAYLNAVVGTALIKKYPKLESEFVYGDYKVYDVRKMIAKSEQEIGKATAKYFFYSNIMNFFKTEITLANGEIRKRPLIETNGETGEIVWDKGRDFATVRKVLSMPQVNIVKKTEVQTGGFSKESILPKRNSDKLIARKKDWDPKKYGGFDSPTVAYSVLVVAKVEKGKSKKLKSVKELLGITIMERSSFEKNPIDFLEAKGYKEVKKDLIIKLPKYSLFELENGRKRMLASAGELQKGNELALPSKYVNFLYLASHYEKLKGSPEDNEQKQLFVEQHKHYLDEIIEQISEFSKRVILADANLDKVLSAYNKHRMNHRVEITEGILADECAALLCYFFRMPRQVFNAQKKAQSSTDGSSGSETPGTSESATPESSGSEVEFSHEYWMRHALTLAKRARDEREVPVGAVLVLNNRVIGEGWNRAIGLHDPTAHAEIMALRQGGLVMQNYRLIDATLYVTFEPCVMCAGAMIHSRIGRVVFGVRNAKTGAAGSLMDVLHYPGDKPIREQAENIIHLFTLTNLGAPAAFKYFDTTIDRKRYTSTKEVLDATLIHQSITGLYETRIDLSQLGGD

SEQ ID NO: 300 - protein, 1454 aa, synthetic construct
  REGION 1..1454: note = 124 Cas9 delta 792-872TadAins polypeptide sequence
MDKKYSIGLAIGTNSVGWAVITDEYKVPSKKFKVLGNTDRHSIKKNLIGALLFDSGETAEATRLKRTARRRYTRRKNRICYLQEIFSNEMAKVDDSFFHRLEESFLVEEDKKHERHPIFGNIVDEVAYHEKYPTIYHLRKKLVDSTDKADLRLIYLALAHMIKFRGHFLIEGDLNPDNSDVDKLFIQLVQTYNQLFEENPINASGVDAKAILSARLSKSRRLENLIAQLPGEKKNGLFGNLIALSLGLTPNFKSNFDLAEDAKLQLSKDTYDDDLDNLLAQIGDQYADLFLAAKNLSDAILLSDILRVNTEITKAPLSASMIKRYDEHHQDLTLLKALVRQQLPEKYKEIFFDQSKNGYAGYIDGGASQEEFYKFIKPILEKMDGTEELLVKLNREDLLRKQRTFDNGSIPHQIHLGELHAILRRQEDFYPFLKDNREKIEKILTFRIPYYVGPLARGNSRFAWMTRKSEETITPWNFEEVVDKGASAQSFIERMTNFDKNLPNEKVLPKHSLLYEYFTVYNELTKVKYVTEGMRKPAFLSGEQKKAIVDLLFKTNRKVTVKQLKEDYFKKIECFDSVEISGVEDRFNASLGTYHDLLKIIKDKDFLDNEENEDILEDIVLTLTLFEDREMIEERLKTYAHLFDDKVMKQLKRRRYTGWGRLSRKLINGIRDKQSGKTILDFLKSDGFANRNFMQLIHDDSLTFKEDIQKAQVSGQGDSLHEHIANLAGSPAIKKGILQTVKVVDELVKVMGRHKPENIVIEMARENQTTQKGQKNSRERMKRIEEGIKELGSEVEFSHEYWMRHALTLAKRARDEREVPVGAVLVLNNRVIGEGWNRAIGLHDPTAHAEIMALRQGGLVMQNYRLIDATLYVTFEPCVMCAGAMIHSRIGRVVFGVRNAKTGAAGSLMDVLHYPGMNHRVEITEGILADECAALLCYFFRMPRQVFNAQKKAQSSTDEEVVKKMKNYWRQLLNAKLITQRKFDNLTKAERGGLSELDKAGFIKRQLVETRQITKHVAQILDSRMNTKYDENDKLIREVKVITLKSKLVSDFRKDFQFYKVREINNYHHAHDAYLNAVVGTALIKKYPKLESEFVYGDYKVYDVRKMIAKSEQEIGKATAKYFFYSNIMNFFKTEITLANGEIRKRPLIETNGETGEIVWDKGRDFATVRKVLSMPQVNIVKKTEVQTGGFSKESILPKRNSDKLIARKKDWDPKKYGGFDSPTVAYSVLVVAKVEKGKSKKLKSVKELLGITIMERSSFEKNPIDFLEAKGYKEVKKDLIIKLPKYSLFELENGRKRMLASAGELQKGNELALPSKYVNFLYLASHYEKLKGSPEDNEQKQLFVEQHKHYLDEIIEQISEFSKRVILADANLDKVLSAYNKHRDKPIREQAENIIHLFTLTNLGAPAAFKYFDTTIDRKRYTSTKEVLDATLIHQSITGLYETRIDLSQLGGD

SEQ ID NO: 301 - protein, 1420 aa, synthetic construct
  REGION 1..1420: note = 125 Cas9 delta 792-906TadAins polypeptide sequence
MDKKYSIGLAIGTNSVGWAVITDEYKVPSKKFKVLGNTDRHSIKKNLIGALLFDSGETAEATRLKRTARRRYTRRKNRICYLQEIFSNEMAKVDDSFFHRLEESFLVEEDKKHERHPIFGNIVDEVAYHEKYPTIYHLRKKLVDSTDKADLRLIYLALAHMIKFRGHFLIEGDLNPDNSDVDKLFIQLVQTYNQLFEENPINASGVDAKAILSARLSKSRRLENLIAQLPGEKKNGLFGNLIALSLGLTPNFKSNFDLAEDAKLQLSKDTYDDDLDNLLAQIGDQYADLFLAAKNLSDAILLSDILRVNTEITKAPLSASMIKRYDEHHQDLTLLKALVRQQLPEKYKEIFFDQSKNGYAGYIDGGASQEEFYKFIKPILEKMDGTEELLVKLNREDLLRKQRTFDNGSIPHQIHLGELHAILRRQEDFYPFLKDNREKIEKILTFRIPYYVGPLARGNSRFAWMTRKSEETITPWNFEEVVDKGASAQSFIERMTNFDKNLPNEKVLPKHSLLYEYFTVYNELTKVKYVTEGMRKPAFLSGEQKKAIVDLLFKTNRKVTVKQLKEDYFKKIECFDSVEISGVEDRFNASLGTYHDLLKIIKDKDFLDNEENEDILEDIVLTLTLFEDREMIEERLKTYAHLFDDKVMKQLKRRRYTGWGRLSRKLINGIRDKQSGKTILDFLKSDGFANRNFMQLIHDDSLTFKEDIQKAQVSGQGDSLHEHIANLAGSPAIKKGILQTVKVVDELVKVMGRHKPENIVIEMARENQTTQKGQKNSRERMKRIEEGIKELGSEVEFSHEYWMRHALTLAKRARDEREVPVGAVLVLNNRVIGEGWNRAIGLHDPTAHAEIMALRQGGLVMQNYRLIDATLYVTFEPCVMCAGAMIHSRIGRVVFGVRNAKTGAAGSLMDVLHYPGMNHRVEITEGILADECAALLCYFFRMPRQVFNAQKKAQSSTDGLSELDKAGFIKRQLVETRQITKHVAQILDSRMNTKYDENDKLIREVKVITLKSKLVSDFRKDFQFYKVREINNYHHAHDAYLNAVVGTALIKKYPKLESEFVYGDYKVYDVRKMIAKSEQEIGKATAKYFFYSNIMNFFKTEITLANGEIRKRPLIETNGETGEIVWDKGRDFATVRKVLSMPQVNIVKKTEVQTGGFSKESILPKRNSDKLIARKKDWDPKKYGGFDSPTVAYSVLVVAKVEKGKSKKLKSVKELLGITIMERSSFEKNPIDFLEAKGYKEVKKDLIIKLPKYSLFELENGRKRMLASAGELQKGNELALPSKYVNFLYLASHYEKLKGSPEDNEQKQLFVEQHKHYLDEIIEQISEFSKRVILADANLDKVLSAYNKHRDKPIREQAENIIHLFTLTNLGAPAAFKYFDTTIDRKRYTSTKEVLDATLIHQSITGLYETRIDLSQLGGD

SEQ ID NO: 302 - protein, 1554 aa, synthetic construct
  REGION 1..1554: note = 126 TadA CP65ins 1003 polypeptide sequence
MDKKYSIGLAIGTNSVGWAVITDEYKVPSKKFKVLGNTDRHSIKKNLIGALLFDSGETAEATRLKRTARRRYTRRKNRICYLQEIFSNEMAKVDDSFFHRLEESFLVEEDKKHERHPIFGNIVDEVAYHEKYPTIYHLRKKLVDSTDKADLRLIYLALAHMIKFRGHFLIEGDLNPDNSDVDKLFIQLVQTYNQLFEENPINASGVDAKAILSARLSKSRRLENLIAQLPGEKKNGLFGNLIALSLGLTPNFKSNFDLAEDAKLQLSKDTYDDDLDNLLAQIGDQYADLFLAAKNLSDAILLSDILRVNTEITKAPLSASMIKRYDEHHQDLTLLKALVRQQLPEKYKEIFFDQSKNGYAGYIDGGASQEEFYKFIKPILEKMDGTEELLVKLNREDLLRKQRTFDNGSIPHQIHLGELHAILRRQEDFYPFLKDNREKIEKILTFRIPYYVGPLARGNSRFAWMTRKSEETITPWNFEEVVDKGASAQSFIERMTNFDKNLPNEKVLPKHSLLYEYFTVYNELTKVKYVTEGMRKPAFLSGEQKKAIVDLLFKTNRKVTVKQLKEDYFKKIECFDSVEISGVEDRFNASLGTYHDLLKIIKDKDFLDNEENEDILEDIVLTLTLFEDREMIEERLKTYAHLFDDKVMKQLKRRRYTGWGRLSRKLINGIRDKQSGKTILDFLKSDGFANRNFMQLIHDDSLTFKEDIQKAQVSGQGDSLHEHIANLAGSPAIKKGILQTVKVVDELVKVMGRHKPENIVIEMARENQTTQKGQKNSRERMKRIEEGIKELGSQILKEHPVENTQLQNEKLYLYYLQNGRDMYVDQELDINRLSDYDVDHIVPQSFLKDDSIDNKVLTRSDKNRGKSDNVPSEEVVKKMKNYWRQLLNAKLITQRKFDNLTKAERGGLSELDKAGFIKRQLVETRQITKHVAQILDSRMNTKYDENDKLIREVKVITLKSKLVSDFRKDFQFYKVREINNYHHAHDAYLNAVVGTALIKKYPKTAHAEIMALRQGGLVMQNYRLIDATLYVTFEPCVMCAGAMIHSRIGRVVFGVRNAKTGAAGSLMDVLHYPGMNHRVEITEGILADECAALLCYFFRMPRQVFNAQKKAQSSTDGSSGSETPGTSESATPESSGSEVEFSHEYWMRHALTLAKRARDEREVPVGAVLVLNNRVIGEGWNRAIGLHDPLESEFVYGDYKVYDVRKMIAKSEQEIGKATAKYFFYSNIMNFFKTEITLANGEIRKRPLIETNGETGEIVWDKGRDFATVRKVLSMPQVNIVKKTEVQTGGFSKESILPKRNSDKLIARKKDWDPKKYGGFDSPTVAYSVLVVAKVEKGKSKKLKSVKELLGITIMERSSFEKNPIDFLEAKGYKEVKKDLIIKLPKYSLFELENGRKRMLASAGELQKGNELALPSKYVNFLYLASHYEKLKGSPEDNEQKQLFVEQHKHYLDEIIEQISEFSKRVILADANLDKVLSAYNKHRDKPIREQAENIIHLFTLTNLGAPAAFKYFDTTIDRKRYTSTKEVLDATLIHQSITGLYETRIDLSQLGGD

SEQ ID NO: 303 - protein, 1554 aa, synthetic construct
  REGION 1..1554: note = 127 TadA CP65ins 1016 polypeptide sequence
MDKKYSIGLAIGTNSVGWAVITDEYKVPSKKFKVLGNTDRHSIKKNLIGALLFDSGETAEATRLKRTARRRYTRRKNRICYLQEIFSNEMAKVDDSFFHRLEESFLVEEDKKHERHPIFGNIVDEVAYHEKYPTIYHLRKKLVDSTDKADLRLIYLALAHMIKFRGHFLIEGDLNPDNSDVDKLFIQLVQTYNQLFEENPINASGVDAKAILSARLSKSRRLENLIAQLPGEKKNGLFGNLIALSLGLTPNFKSNFDLAEDAKLQLSKDTYDDDLDNLLAQIGDQYADLFLAAKNLSDAILLSDILRVNTEITKAPLSASMIKRYDEHHQDLTLLKALVRQQLPEKYKEIFFDQSKNGYAGYIDGGASQEEFYKFIKPILEKMDGTEELLVKLNREDLLRKQRTFDNGSIPHQIHLGELHAILRRQEDFYPFLKDNREKIEKILTFRIPYYVGPLARGNSRFAWMTRKSEETITPWNFEEVVDKGASAQSFIERMTNFDKNLPNEKVLPKHSLLYEYFTVYNELTKVKYVTEGMRKPAFLSGEQKKAIVDLLFKTNRKVTVKQLKEDYFKKIECFDSVEISGVEDRFNASLGTYHDLLKIIKDKDFLDNEENEDILEDIVLTLTLFEDREMIEERLKTYAHLFDDKVMKQLKRRRYTGWGRLSRKLINGIRDKQSGKTILDFLKSDGFANRNFMQLIHDDSLTFKEDIQKAQVSGQGDSLHEHIANLAGSPAIKKGILQTVKVVDELVKVMGRHKPENIVIEMARENQTTQKGQKNSRERMKRIEEGIKELGSQILKEHPVENTQLQNEKLYLYYLQNGRDMYVDQELDINRLSDYDVDHIVPQSFLKDDSIDNKVLTRSDKNRGKSDNVPSEEVVKKMKNYWRQLLNAKLITQRKFDNLTKAERGGLSELDKAGFIKRQLVETRQITKHVAQILDSRMNTKYDENDKLIREVKVITLKSKLVSDFRKDFQFYKVREINNYHHAHDAYLNAVVGTALIKKYPKLESEFVYGDYKVTAHAEIMALRQGGLVMQNYRLIDATLYVTFEPCVMCAGAMIHSRIGRVVFGVRNAKTGAAGSLMDVLHYPGMNHRVEITEGILADECAALLCYFFRMPRQVFNAQKKAQSSTDGSSGSETPGTSESATPESSGSEVEFSHEYWMRHALTLAKRARDEREVPVGAVLVLNNRVIGEGWNRAIGLHDPYDVRKMIAKSEQEIGKATAKYFFYSNIMNFFKTEITLANGEIRKRPLIETNGETGEIVWDKGRDFATVRKVLSMPQVNIVKKTEVQTGGFSKESILPKRNSDKLIARKKDWDPKKYGGFDSPTVAYSVLVVAKVEKGKSKKLKSVKELLGITIMERSSFEKNPIDFLEAKGYKEVKKDLIIKLPKYSLFELENGRKRMLASAGELQKGNELALPSKYVNFLYLASHYEKLKGSPEDNEQKQLFVEQHKHYLDEIIEQISEFSKRVILADANLDKVLSAYNKHRDKPIREQAENIIHLFTLTNLGAPAAFKYFDTTIDRKRYTSTKEVLDATLIHQSITGLYETRIDLSQLGGD

SEQ ID NO: 304 - protein, 1554 aa, synthetic construct
  REGION 1..1554: note = 128 TadA CP65ins 1022 polypeptide sequence
MDKKYSIGLAIGTNSVGWAVITDEYKVPSKKFKVLGNTDRHSIKKNLIGALLFDSGETAEATRLKRTARRRYTRRKNRICYLQEIFSNEMAKVDDSFFHRLEESFLVEEDKKHERHPIFGNIVDEVAYHEKYPTIYHLRKKLVDSTDKADLRLIYLALAHMIKFRGHFLIEGDLNPDNSDVDKLFIQLVQTYNQLFEENPINASGVDAKAILSARLSKSRRLENLIAQLPGEKKNGLFGNLIALSLGLTPNFKSNFDLAEDAKLQLSKDTYDDDLDNLLAQIGDQYADLFLAAKNLSDAILLSDILRVNTEITKAPLSASMIKRYDEHHQDLTLLKALVRQQLPEKYKEIFFDQSKNGYAGYIDGGASQEEFYKFIKPILEKMDGTEELLVKLNREDLLRKQRTFDNGSIPHQIHLGELHAILRRQEDFYPFLKDNREKIEKILTFRIPYYVGPLARGNSRFAWMTRKSEETITPWNFEEVVDKGASAQSFIERMTNFDKNLPNEKVLPKHSLLYEYFTVYNELTKVKYVTEGMRKPAFLSGEQKKAIVDLLFKTNRKVTVKQLKEDYFKKIECFDSVEISGVEDRFNASLGTYHDLLKIIKDKDFLDNEENEDILEDIVLTLTLFEDREMIEERLKTYAHLFDDKVMKQLKRRRYTGWGRLSRKLINGIRDKQSGKTILDFLKSDGFANRNFMQLIHDDSLTFKEDIQKAQVSGQGDSLHEHIANLAGSPAIKKGILQTVKVVDELVKVMGRHKPENIVIEMARENQTTQKGQKNSRERMKRIEEGIKELGSQILKEHPVENTQLQNEKLYLYYLQNGRDMYVDQELDINRLSDYDVDHIVPQSFLKDDSIDNKVLTRSDKNRGKSDNVPSEEVVKKMKNYWRQLLNAKLITQRKFDNLTKAERGGLSELDKAGFIKRQLVETRQITKHVAQILDSRMNTKYDENDKLIREVKVITLKSKLVSDFRKDFQFYKVREINNYHHAHDAYLNAVVGTALIKKYPKLESEFVYGDYKVYDVRKMITAHAEIMALRQGGLVMQNYRLIDATLYVTFEPCVMCAGAMIHSRIGRVVFGVRNAKTGAAGSLMDVLHYPGMNHRVEITEGILADECAALLCYFFRMPRQVFNAQKKAQSSTDGSSGSETPGTSESATPESSGSEVEFSHEYWMRHALTLAKRARDEREVPVGAVLVLNNRVIGEGWNRAIGLHDPAKSEQEIGKATAKYFFYSNIMNFFKTEITLANGEIRKRPLIETNGETGEIVWDKGRDFATVRKVLSMPQVNIVKKTEVQTGGFSKESILPKRNSDKLIARKKDWDPKKYGGFDSPTVAYSVLVVAKVEKGKSKKLKSVKELLGITIMERSSFEKNPIDFLEAKGYKEVKKDLIIKLPKYSLFELENGRKRMLASAGELQKGNELALPSKYVNFLYLASHYEKLKGSPEDNEQKQLFVEQHKHYLDEIIEQISEFSKRVILADANLDKVLSAYNKHRDKPIREQAENIIHLFTLTNLGAPAAFKYFDTTIDRKRYTSTKEVLDATLIHQSITGLYETRIDLSQLGGD

SEQ ID NO: 305 - protein, 1554 aa, synthetic construct
  REGION 1..1554: note = 129 TadA CP65ins 1029 polypeptide sequence
MDKKYSIGLAIGTNSVGWAVITDEYKVPSKKFKVLGNTDRHSIKKNLIGALLFDSGETAEATRLKRTARRRYTRRKNRICYLQEIFSNEMAKVDDSFFHRLEESFLVEEDKKHERHPIFGNIVDEVAYHEKYPTIYHLRKKLVDSTDKADLRLIYLALAHMIKFRGHFLIEGDLNPDNSDVDKLFIQLVQTYNQLFEENPINASGVDAKAILSARLSKSRRLENLIAQLPGEKKNGLFGNLIALSLGLTPNFKSNFDLAEDAKLQLSKDTYDDDLDNLLAQIGDQYADLFLAAKNLSDAILLSDILRVNTEITKAPLSASMIKRYDEHHQDLTLLKALVRQQLPEKYKEIFFDQSKNGYAGYIDGGASQEEFYKFIKPILEKMDGTEELLVKLNREDLLRKQRTFDNGSIPHQIHLGELHAILRRQEDFYPFLKDNREKIEKILTFRIPYYVGPLARGNSRFAWMTRKSEETITPWNFEEVVDKGASAQSFIERMTNFDKNLPNEKVLPKHSLLYEYFTVYNELTKVKYVTEGMRKPAFLSGEQKKAIVDLLFKTNRKVTVKQLKEDYFKKIECFDSVEISGVEDRFNASLGTYHDLLKIIKDKDFLDNEENEDILEDIVLTLTLFEDREMIEERLKTYAHLFDDKVMKQLKRRRYTGWGRLSRKLINGIRDKQSGKTILDFLKSDGFANRNFMQLIHDDSLTFKEDIQKAQVSGQGDSLHEHIANLAGSPAIKKGILQTVKVVDELVKVMGRHKPENIVIEMARENQTTQKGQKNSRERMKRIEEGIKELGSQILKEHPVENTQLQNEKLYLYYLQNGRDMYVDQELDINRLSDYDVDHIVPQSFLKDDSIDNKVLTRSDKNRGKSDNVPSEEVVKKMKNYWRQLLNAKLITQRKFDNLTKAERGGLSELDKAGFIKRQLVETRQITKHVAQILDSRMNTKYDENDKLIREVKVITLKSKLVSDFRKDFQFYKVREINNYHHAHDAYLNAVVGTALIKKYPKLESEFVYGDYKVYDVRKMIAKSEQEITAHAEIMALRQGGLVMQNYRLIDATLYVTFEPCVMCAGAMIHSRIGRVVFGVRNAKTGAAGSLMDVLHYPGMNHRVEITEGILADECAALLCYFFRMPRQVFNAQKKAQSSTDGSSGSETPGTSESATPESSGSEVEFSHEYWMRHALTLAKRARDEREVPVGAVLVLNNRVIGEGWNRAIGLHDPGKATAKYFFYSNIMNFFKTEITLANGEIRKRPLIETNGETGEIVWDKGRDFATVRKVLSMPQVNIVKKTEVQTGGFSKESILPKRNSDKLIARKKDWDPKKYGGFDSPTVAYSVLVVAKVEKGKSKKLKSVKELLGITIMERSSFEKNPIDFLEAKGYKEVKKDLIIKLPKYSLFELENGRKRMLASAGELQKGNELALPSKYVNFLYLASHYEKLKGSPEDNEQKQLFVEQHKHYLDEIIEQISEFSKRVILADANLDKVLSAYNKHRDKPIREQAENIIHLFTLTNLGAPAAFKYFDTTIDRKRYTSTKEVLDATLIHQSITGLYETRIDLSQLGGD

SEQ ID NO: 306 - protein, 1554 aa, synthetic construct
  REGION 1..1554: note = 130 TadA CP65ins 1041 polypeptide sequence
MDKKYSIGLAIGTNSVGWAVITDEYKVPSKKFKVLGNTDRHSIKKNLIGALLFDSGETAEATRLKRTARRRYTRRKNRICYLQEIFSNEMAKVDDSFFHRLEESFLVEEDKKHERHPIFGNIVDEVAYHEKYPTIYHLRKKLVDSTDKADLRLIYLALAHMIKFRGHFLIEGDLNPDNSDVDKLFIQLVQTYNQLFEENPINASGVDAKAILSARLSKSRRLENLIAQLPGEKKNGLFGNLIALSLGLTPNFKSNFDLAEDAKLQLSKDTYDDDLDNLLAQIGDQYADLFLAAKNLSDAILLSDILRVNTEITKAPLSASMIKRYDEHHQDLTLLKALVRQQLPEKYKEIFFDQSKNGYAGYIDGGASQEEFYKFIKPILEKMDGTEELLVKLNREDLLRKQRTFDNGSIPHQIHLGELHAILRRQEDFYPFLKDNREKIEKILTFRIPYYVGPLARGNSRFAWMTRKSEETITPWNFEEVVDKGASAQSFIERMTNFDKNLPNEKVLPKHSLLYEYFTVYNELTKVKYVTEGMRKPAFLSGEQKKAIVDLLFKTNRKVTVKQLKEDYFKKIECFDSVEISGVEDRFNASLGTYHDLLKIIKDKDFLDNEENEDILEDIVLTLTLFEDREMIEERLKTYAHLFDDKVMKQLKRRRYTGWGRLSRKLINGIRDKQSGKTILDFLKSDGFANRNFMQLIHDDSLTFKEDIQKAQVSGQGDSLHEHIANLAGSPAIKKGILQTVKVVDELVKVMGRHKPENIVIEMARENQTTQKGQKNSRERMKRIEEGIKELGSQILKEHPVENTQLQNEKLYLYYLQNGRDMYVDQELDINRLSDYDVDHIVPQSFLKDDSIDNKVLTRSDKNRGKSDNVPSEEVVKKMKNYWRQLLNAKLITQRKFDNLTKAERGGLSELDKAGFIKRQLVETRQITKHVAQILDSRMNTKYDENDKLIREVKVITLKSKLVSDFRKDFQFYKVREINNYHHAHDAYLNAVVGTALIKKYPKLESEFVYGDYKVYDVRKMIAKSEQEIGKATAKYFFYSTAHAEIMALRQGGLVMQNYRLIDATLYVTFEPCVMCAGAMIHSRIGRVVFGVRNAKTGAAGSLMDVLHYPGMNHRVEITEGILADECAALLCYFFRMPRQVFNAQKKAQSSTDGSSGSETPGTSESATPESSGSEVEFSHEYWMRHALTLAKRARDEREVPVGAVLVLNNRVIGEGWNRAIGLHDPNIMNFFKTEITLANGEIRKRPLIETNGETGEIVWDKGRDFATVRKVLSMPQVNIVKKTEVQTGGFSKESILPKRNSDKLIARKKDWDPKKYGGFDSPTVAYSVLVVAKVEKGKSKKLKSVKELLGITIMERSSFEKNPIDFLEAKGYKEVKKDLIIKLPKYSLFELENGRKRMLASAGELQKGNELALPSKYVNFLYLASHYEKLKGSPEDNEQKQLFVEQHKHYLDEIIEQISEFSKRVILADANLDKVLSAYNKHRDKPIREQAENIIHLFTLTNLGAPAAFKYFDTTIDRKRYTSTKEVLDATLIHQSITGLYETRIDLSQLGGD

SEQ ID NO: 307 - protein, 1554 aa, synthetic construct
  REGION 1..1554: note = 131 TadA CP65ins 1054 polypeptide sequence
MDKKYSIGLAIGTNSVGWAVITDEYKVPSKKFKVLGNTDRHSIKKNLIGALLFDSGETAEATRLKRTARRRYTRRKNRICYLQEIFSNEMAKVDDSFFHRLEESFLVEEDKKHERHPIFGNIVDEVAYHEKYPTIYHLRKKLVDSTDKADLRLIYLALAHMIKFRGHFLIEGDLNPDNSDVDKLFIQLVQTYNQLFEENPINASGVDAKAILSARLSKSRRLENLIAQLPGEKKNGLFGNLIALSLGLTPNFKSNFDLAEDAKLQLSKDTYDDDLDNLLAQIGDQYADLFLAAKNLSDAILLSDILRVNTEITKAPLSASMIKRYDEHHQDLTLLKALVRQQLPEKYKEIFFDQSKNGYAGYIDGGASQEEFYKFIKPILEKMDGTEELLVKLNREDLLRKQRTFDNGSIPHQIHLGELHAILRRQEDFYPFLKDNREKIEKILTFRIPYYVGPLARGNSRFAWMTRKSEETITPWNFEEVVDKGASAQSFIERMTNFDKNLPNEKVLPKHSLLYEYFTVYNELTKVKYVTEGMRKPAFLSGEQKKAIVDLLFKTNRKVTVKQLKEDYFKKIECFDSVEISGVEDRFNASLGTYHDLLKIIKDKDFLDNEENEDILEDIVLTLTLFEDREMIEERLKTYAHLFDDKVMKQLKRRRYTGWGRLSRKLINGIRDKQSGKTILDFLKSDGFANRNFMQLIHDDSLTFKEDIQKAQVSGQGDSLHEHIANLAGSPAIKKGILQTVKVVDELVKVMGRHKPENIVIEMARENQTTQKGQKNSRERMKRIEEGIKELGSQILKEHPVENTQLQNEKLYLYYLQNGRDMYVDQELDINRLSDYDVDHIVPQSFLKDDSIDNKVLTRSDKNRGKSDNVPSEEVVKKMKNYWRQLLNAKLITQRKFDNLTKAERGGLSELDKAGFIKRQLVETRQITKHVAQILDSRMNTKYDENDKLIREVKVITLKSKLVSDFRKDFQFYKVREINNYHHAHDAYLNAVVGTALIKKYPKLESEFVYGDYKVYDVRKMIAKSEQEIGKATAKYFFYSNIMNFFKTEITLANTAHAEIMALRQGGLVMQNYRLIDATLYVTFEPCVMCAGAMIHSRIGRVVFGVRNAKTGAAGSLMDVLHYPGMNHRVEITEGILADECAALLCYFFRMPRQVFNAQKKAQSSTDGSSGSETPGTSESATPESSGSEVEFSHEYWMRHALTLAKRARDEREVPVGAVLVLNNRVIGEGWNRAIGLHDPGEIRKRPLIETNGETGEIVWDKGRDFATVRKVLSMPQVNIVKKTEVQTGGFSKESILPKRNSDKLIARKKDWDPKKYGGFDSPTVAYSVLVVAKVEKGKSKKLKSVKELLGITIMERSSFEKNPIDFLEAKGYKEVKKDLIIKLPKYSLFELENGRKRMLASAGELQKGNELALPSKYVNFLYLASHYEKLKGSPEDNEQKQLFVEQHKHYLDEIIEQISEFSKRVILADANLDKVLSAYNKHRDKPIREQAENIIHLFTLTNLGAPAAFKYFDTTIDRKRYTSTKEVLDATLIHQSITGLYETRIDLSQLGGD

SEQ ID NO: 308 - protein, 1554 aa, synthetic construct
  REGION 1..1554: note = 132 TadA CP65ins 1246 polypeptide sequence
MDKKYSIGLAIGTNSVGWAVITDEYKVPSKKFKVLGNTDRHSIKKNLIGALLFDSGETAEATRLKRTARRRYTRRKNRICYLQEIFSNEMAKVDDSFFHRLEESFLVEEDKKHERHPIFGNIVDEVAYHEKYPTIYHLRKKLVDSTDKADLRLIYLALAHMIKFRGHFLIEGDLNPDNSDVDKLFIQLVQTYNQLFEENPINASGVDAKAILSARLSKSRRLENLIAQLPGEKKNGLFGNLIALSLGLTPNFKSNFDLAEDAKLQLSKDTYDDDLDNLLAQIGDQYADLFLAAKNLSDAILLSDILRVNTEITKAPLSASMIKRYDEHHQDLTLLKALVRQQLPEKYKEIFFDQSKNGYAGYIDGGASQEEFYKFIKPILEKMDGTEELLVKLNREDLLRKQRTFDNGSIPHQIHLGELHAILRRQEDFYPFLKDNREKIEKILTFRIPYYVGPLARGNSRFAWMTRKSEETITPWNFEEVVDKGASAQSFIERMTNFDKNLPNEKVLPKHSLLYEYFTVYNELTKVKYVTEGMRKPAFLSGEQKKAIVDLLFKTNRKVTVKQLKEDYFKKIECFDSVEISGVEDRFNASLGTYHDLLKIIKDKDFLDNEENEDILEDIVLTLTLFEDREMIEERLKTYAHLFDDKVMKQLKRRRYTGWGRLSRKLINGIRDKQSGKTILDFLKSDGFANRNFMQLIHDDSLTFKEDIQKAQVSGQGDSLHEHIANLAGSPAIKKGILQTVKVVDELVKVMGRHKPENIVIEMARENQTTQKGQKNSRERMKRIEEGIKELGSQILKEHPVENTQLQNEKLYLYYLQNGRDMYVDQELDINRLSDYDVDHIVPQSFLKDDSIDNKVLTRSDKNRGKSDNVPSEEVVKKMKNYWRQLLNAKLITQRKFDNLTKAERGGLSELDKAGFIKRQLVETRQITKHVAQILDSRMNTKYDENDKLIREVKVITLKSKLVSDFRKDFQFYKVREINNYHHAHDAYLNAVVGTALIKKYPKLESEFVYGDYKVYDVRKMIAKSEQEIGKATAKYFFYSNIMNFFKTEITLANGEIRKRPLIETNGETGEIVWDKGRDFATVRKVLSMPQVNIVKKTEVQTGGFSKESILPKRNSDKLIARKKDWDPKKYGGFDSPTVAYSVLVVAKVEKGKSKKLKSVKELLGITIMERSSFEKNPIDFLEAKGYKEVKKDLIIKLPKYSLFELENGRKRMLASAGELQKGNELALPSKYVNFLYLASHYEKLKGTAHAEIMALRQGGLVMQNYRLIDATLYVTFEPCVMCAGAMIHSRIGRVVFGVRNAKTGAAGSLMDVLHYPGMNHRVEITEGILADECAALLCYFFRMPRQVFNAQKKAQSSTDGSSGSETPGTSESATPESSGSEVEFSHEYWMRHALTLAKRARDEREVPVGAVLVLNNRVIGEGWNRAIGLHDPSPEDNEQKQLFVEQHKHYLDEIIEQISEFSKRVILADANLDKVLSAYNKHRDKPIREQAENIIHLFTLTNLGAPAAFKYFDTTIDRKRYTSTKEVLDATLIHQSITGLYETRIDLSQLGGD

SEQ ID NO: 309 - protein, 160 aa, Staphylococcus aureus
  REGION 1..160: note = MISC_FEATURE - TadA polypeptide sequence
MGSHMTNDIYFMTLAIEEAKKAAQLGEVPIGAIITKDDEVIARAHNLRETLQQPTAHAEHIAIERAAKVLGSWRLEGCTLYVTLEPCVMCAGTIVMSRIPRVVYGADDPKGGCSGSLMNLLQQSNFNHRAIVDKGVLKEACSTLLTTFFKNLRANKKSTN

SEQ ID NO: 310 - protein, 161 aa, Bacillus subtilis
  REGION 1..161: note = MISC_FEATURE - TadA polypeptide sequence
MTQDELYMKEAIKEAKKAEEKGEVPIGAVLVINGEIIARAHNLRETEQRSIAHAEMLVIDEACKALGTWRLEGATLYVTLEPCPMCAGAVVLSRVEKVVFGAFDPKGGCSGTLMNLLQEERFNHQAEVVSGVLEEECGGMLSAFFRELRKKKKAARKNLSE

SEQ ID NO: 311 - protein, 183 aa, Salmonella enterica
  REGION 1..183: note = MISC_FEATURE - TadA polypeptide sequence
  source 1..183: note = serovar Typhimurium
MPPAFITGVTSLSDVELDHEYWMRHALTLAKRAWDEREVPVGAVLVHNHRVIGEGWNRPIGRHDPTAHAEIMALRQGGLVLQNYRLLDTTLYVTLEPCVMCAGAMVHSRIGRVVFGARDAKTGAAGSLIDVLHHPGMNHRVEIIEGVLRDECATLLSDFFRMRRQEIKALKKADRAEGAGPAV

SEQ ID NO: 312 - protein, 164 aa, Shewanella putrefaciens
  REGION 1..164: note = MISC_FEATURE - TadA polypeptide sequence
MDEYWMQVAMQMAEKAEAAGEVPVGAVLVKDGQQIATGYNLSISQHDPTAHAEILCLRSAGKKLENYRLLDATLYITLEPCAMCAGAMVHSRIARVVYGARDEKTGAAGTVVNLLQHPAFNHQVEVTSGVLAEACSAQLSRFFKRRRDEKKALKLAQRAQQGIE

SEQ ID NO: 313 - protein, 173 aa, Haemophilus influenzae
  REGION 1..173: note = MISC_FEATURE - TadA polypeptide sequence
MDAAKVRSEFDEKMMRYALELADKAEALGEIPVGAVLVDDARNIIGEGWNLSIVQSDPTAHAEIIALRNGAKNIQNYRLLNSTLYVTLEPCTMCAGAILHSRIKRLVFGASDYKTGAIGSRFHFFDDYKMNHTLEITSGVLAEECSQKLSTFFQKRREEKKIEKALLKSLSDK

SEQ ID NO: 314 - protein, 161 aa, Caulobacter crescentus
  REGION 1..161: note = MISC_FEATURE - TadA polypeptide sequence
MRTDESEDQDHRMMRLALDAARAAAEAGETPVGAVILDPSTGEVIATAGNGPIAAHDPTAHAEIAAMRAAAAKLGNYRLTDLTLVVTLEPCAMCAGAISHARIGRVVFGADDPKGGAVVHGPKFFAQPTCHWRPEVTGGVLADESADLLRGFFRARRKAKI

SEQ ID NO: 315 - protein, 179 aa, Geobacter sulfurreducens
  REGION 1..179: note = MISC_FEATURE - TadA polypeptide sequence
MSSLKKTPIRDDAYWMGKAIREAAKAAARDEVPIGAVIVRDGAVIGRGHNLREGSNDPSAHAEMIAIRQAARRSANWRLTGATLYVTLEPCLMCMGAIILARLERVVFGCYDPKGGAAGSLYDLSADPRLNHQVRLSPGVCQEECGTMLSDFFRDLRRRKKAKATPALFIDERKVPPEP

SEQ ID NO: 316 - protein, 167 aa, synthetic construct
  REGION 1..167: note = TadA*8 polypeptide sequence
MSEVEFSHEYWMRHALTLAKRARDEREVPVGAVLVLNNRVIGEGWNRAIGLHDPTAHAEIMALRQGGLVMQNYRLIDATLYVTFEPCVMCAGAMIHSRIGRVVFGVRNAKTGAAGSLMDVLHYPGMNHRVEITEGILADECAALLCTFFRMPRQVFNAQKKAQSSTD

SEQ ID NO: 317 - RNA, 80 nt, synthetic construct
  misc_feature 1..80: note = gRNA scaffold polynucleotide sequence
  source 1..80: mol_type = other RNA
gttttagagctagaaatagcaagttaaaataaggctagtccgttatcaacttgaaaaagtggcaccgagtcggtgctttt

SEQ ID NO: 318 - RNA, 125 nt, synthetic construct
  misc_feature 1..125: note = gRNA scaffold polynucleotide sequence
  source 1..125: mol_type = other RNA
gtttttgtactctcaagatttaagtaactgtacaacgaaacttacacagttacttaaatcttgcagaagctacaaagataaggcttcatgccgaaatcaacaccctgtcattttatggcagggtg

SEQ ID NO: 319 - RNA, 76 nt, Streptococcus pyogenes
  misc_feature 1..76: note = S. pyogenes gRNA scaffold oligonucleotide sequence
  source 1..76: mol_type = other RNA
gttttagagctagaaatagcaagttaaaataaggctagtccgttatcaacttgaaaaagtggcaccgagtcggtgc

SEQ ID NO: 320 - RNA, 84 nt, Staphylococcus aureus
  misc_feature 1..84: note = S. aureus gRNA scaffold oligonucleotide sequence
  source 1..84: mol_type = other RNA
gttttagtactctgtaatgaaaattacagaatctactaaaacaaggcaaaatgccgtgtttatctcgtcaacttgttggcgaga

SEQ ID NO: 321 - RNA, 97 nt, Bacillus hisashii
  misc_feature 1..97: note = BhCas12b gRNA scaffold oligonucleotide sequence
  source 1..97: mol_type = other RNA
gttctgtcttttggtcaggacaaccgtctagctataagtgctgcagggtgtgagaaactcctattgctggacgatgtctcttacgaggcattagcac

SEQ ID NO: 322 - RNA, 88 nt, Bacillus sp.
  misc_feature 1..88: note = BvCas12b gRNA scaffold oligonucleotide sequence
  source 1..88: mol_type = other RNA
gacctatagggtcaatgaatctgtgcgtgtgccataagtaattaaaaattacccaccacaggagcacctgaaaacaggtgcttggcac

SEQ ID NO: 323 - RNA, 80 nt, synthetic construct
  misc_feature 1..80: note = gRNA scaffold nucleotide sequence; oligonucleotide sequence
  modified_base 78..80: mod_base = um
  misc_feature 78..80: note = In embodiments, a nucleotide(s) is linked to the preceding 5' nucleotide by a 3' phosphorothioate internucleotide linkage
  source 1..80: mol_type = other RNA
gttttagagctagaaatagcaagttaaaataaggctagtccgttatcaacttgaaaaagtgggaccgagtcggtgctttt

SEQ ID NO: 324 - RNA, 80 nt, synthetic construct; identical to SEQ ID NO: 317
  misc_feature 1..80: note = gRNA scaffold nucleotide sequence
  misc_feature 78..80: note = In embodiments, a nucleotide(s) is linked to the preceding 5' nucleotide by a 3' phosphorothioate internucleotide linkage
  modified_base 78..80: mod_base = um
  source 1..80: mol_type = other RNA

SEQ ID NO: 325 - RNA, 117 nt, Bacillus hisashii
  misc_feature 1..117: note = BhCas12b gRNA scaffold + guide sequence; oligonucleotide sequence
  misc_feature 1..97: note = BhCas12b sgRNA scaffold
  source 1..117: mol_type = other RNA
gttctgtcttttggtcaggacaaccgtctagctataagtgctgcagggtgtgagaaactcctattgctggacgatgtctcttacgaggcattagcacnnnnnnnnnnnnnnnnnnnn

SEQ ID NO: 326 - RNA, 108 nt, Bacillus sp.
  misc_feature 1..108: note = BvCas12b gRNA scaffold + guide sequence; oligonucleotide sequence
  misc_feature 1..88: note = BvCas12b gRNA scaffold
  source 1..108: mol_type = other RNA
gacctatagggtcaatgaatctgtgcgtgtgccataagtaattaaaaattacccaccacaggagcacctgaaaacaggtgcttggcacnnnnnnnnnnnnnnnnnnnn

SEQ ID NO: 327 - RNA, 119 nt, Alicyclobacillus acidiphilus
  misc_feature 1..119: note = AaCas12b gRNA scaffold + guide sequence; oligonucleotide sequence
  misc_feature 1..99: note = AaCas12b gRNA scaffold
  source 1..119: mol_type = other RNA
gtctaaaggacagaatttttcaacgggtgtgccaatggccactttccaggtggcaaagcccgttgaacttctcaaaaagaacgatctgagaagtggcacnnnnnnnnnnnnnnnnnnnn

SEQ ID NO: 328 - protein, 29 aa, synthetic construct
  REGION 1..29: note = synthetic polypeptide sequence
PKKKRKVEGADKRTADGSEFESPKKKRKV

SEQ ID NO: 329 - protein, 23 aa, synthetic construct
  REGION 1..23: note = synthetic peptide sequence
RKSGKIAAIVVKRPRKPKKKRKV

SEQ ID NO: 330 - protein, 8 aa, synthetic construct
  REGION 1..8: note = synthetic peptide sequence
SGGSSGGS

SEQ ID NO: 331 - protein, 1609 aa, synthetic construct
  REGION 1..1609: note = pNMG-B335ABE8.1_Y147T_CP5_NGC PAM_monomer polypeptide sequence
MSEVEFSHEYWMRHALTLAKRARDEREVPVGAVLVLNNRVIGEGWNRAIGLHDPTAHAEIMALRQGGLVMQNYRLIDATLYVTFEPCVMCAGAMIHSRIGRVVFGVRNAKTGAAGSLMDVLHYPGMNHRVEITEGILADECAALLCTFFRMPRQVFNAQKKAQSSTDSGGSSGGSSGSETPGTSESATPESSGGSSGGSEIGKATAKYFFYSNIMNFFKTEITLANGEIRKRPLIETNGETGEIVWDKGRDFATVRKVLSMPQVNIVKKTEVQTGGFSKESILPKRNSDKLIARKKDWDPKKYGGFMQPTVAYSVLVVAKVEKGKSKKLKSVKELLGITIMERSSFEKNPIDFLEAKGYKEVKKDLIIKLPKYSLFELENGRKRMLASAKFLQKGNELALPSKYVNFLYLASHYEKLKGSPEDNEQKQLFVEQHKHYLDEIIEQISEFSKRVILADANLDKVLSAYNKHRDKPIREQAENIIHLFTLTNLGAPRAFKYFDTTIARKEYRSTKEVLDATLIHQSITGLYETRIDLSQLGGDGGSGGSGGSGGSGGSGGSGGMDKKYSIGLAIGTNSVGWAVITDEYKVPSKKFKVLGNTDRHSIKKNLIGALLFDSGETAEATRLKRTARRRYTRRKNRICYLQEIFSNEMAKVDDSFFHRLEESFLVEEDKKHERHPIFGNIVDEVAYHEKYPTIYHLRKKLVDSTDKADLRLIYLALAHMIKFRGHFLIEGDLNPDNSDVDKLFIQLVQTYNQLFEENPINASGVDAKAILSARLSKSRRLENLIAQLPGEKKNGLFGNLIALSLGLTPNFKSNFDLAEDAKLQLSKDTYDDDLDNLLAQIGDQYADLFLAAKNLSDAILLSDILRVNTEITKAPLSASMIKRYDEHHQDLTLLKALVRQQLPEKYKEIFFDQSKNGYAGYIDGGASQEEFYKFIKPILEKMDGTEELLVKLNREDLLRKQRTFDNGSIPHQIHLGELHAILRRQEDFYPFLKDNREKIEKILTFRIPYYVGPLARGNSRFAWMTRKSEETITPWNFEEVVDKGASAQSFIERMTNFDKNLPNEKVLPKHSLLYEYFTVYNELTKVKYVTEGMRKPAFLSGEQKKAIVDLLFKTNRKVTVKQLKEDYFKKIECFDSVEISGVEDRFNASLGTYHDLLKIIKDKDFLDNEENEDILEDIVLTLTLFEDREMIEERLKTYAHLFDDKVMKQLKRRRYTGWGRLSRKLINGIRDKQSGKTILDFLKSDGFANRNFMQLIHDDSLTFKEDIQKAQVSGQGDSLHEHIANLAGSPAIKKGILQTVKVVDELVKVMGRHKPENIVIEMARENQTTQKGQKNSRERMKRIEEGIKELGSQILKEHPVENTQLQNEKLYLYYLQNGRDMYVDQELDINRLSDYDVDHIVPQSFLKDDSIDNKVLTRSDKNRGKSDNVPSEEVVKKMKNYWRQLLNAKLITQRKFDNLTKAERGGLSELDKAGFIKRQLVETRQITKHVAQILDSRMNTKYDENDKLIREVKVITLKSKLVSDFRKDFQFYKVREINNYHHAHDAYLNAVVGTALIKKYPKLESEFVYGDYKVYDVRKMIAKSEQEGADKRTADGSEFESPKKKRKV

SEQ ID NO: 332 - protein, 1807 aa, synthetic construct
  REGION 1..1807: note = pNMG-357_ABE8.14 with NGC PAMCP5 polypeptide sequence
  REGION 1..174: note = MISC_FEATURE - Adenosine deaminase sequence
  REGION 175..198: note = MISC_FEATURE - Linker sequence
  REGION 199..365: note = MISC_FEATURE - Adenosine deaminase sequence
  REGION 366..397: note = MISC_FEATURE - Linker sequence
  REGION 398..738: note = MISC_FEATURE - Sequence derived from Cas9
  REGION 739..759: note = MISC_FEATURE - Linker sequence
  REGION 760..1785: note = MISC_FEATURE - Sequence derived from Cas9
  REGION 1786..1807: note = MISC_FEATURE - Bipartite nuclear localization sequence
MSEVEFSHEYWMRHALTLAKRAWDEREVPVGAVLVHNNRVIGEGWNRPIGRHDPTAHAEIMALRQGGLVMQNYRLIDATLYVTLEPCVMCAGAMIHSRIGRVVFGARDAKTGAAGSLMDVLHHPGMNHRVEITEGILADECAALLSDFFRMRRQEIKAQKKAQSSTDGGSSGGSSGSETPGTSESATPESSGGSSGGSMSEVEFSHEYWMRHALTLAKRARDEREVPVGAVLVLNNRVIGEGWNRAIGLHDPTAHAEIMALRQGGLVMQNYRLIDATLYVTFEPCVMCAGAMIHSRIGRVVFGVRNAKTGAAGSLMDVLHYPGMNHRVEITEGILADECAALLCTFFRMPRQVFNAQKKAQSSTDSGGSSGGSSGSETPGTSESATPESSGGSSGGSEIGKATAKYFFYSNIMNFFKTEITLANGEIRKRPLIETNGETGEIVWDKGRDFATVRKVLSMPQVNIVKKTEVQTGGFSKESILPKRNSDKLIARKKDWDPKKYGGFMQPTVAYSVLVVAKVEKGKSKKLKSVKELLGITIMERSSFEKNPIDFLEAKGYKEVKKDLIIKLPKYSLFELENGRKRMLASAKFLQKGNELALPSKYVNFLYLASHYEKLKGSPEDNEQKQLFVEQHKHYLDEIIEQISEFSKRVILADANLDKVLSAYNKHRDKPIREQAENIIHLFTLTNLGAPRAFKYFDTTIARKEYRSTKEVLDATLIHQSITGLYETRIDLSQLGGDGGSGGSGGSGGSGGSGGSGGMDKKYSIGLAIGTNSVGWAVITDEYKVPSKKFKVLGNTDRHSIKKNLIGALLFDSGETAEATRLKRTARRRYTRRKNRICYLQEIFSNEMAKVDDSFFHRLEESFLVEEDKKHERHPIFGNIVDEVAYHEKYPTIYHLRKKLVDSTDKADLRLIYLALAHMIKFRGHFLIEGDLNPDNSDVDKLFIQLVQTYNQLFEENPINASGVDAKAILSARLSKSRRLENLIAQLPGEKKNGLFGNLIALSLGLTPNFKSNFDLAEDAKLQLSKDTYDDDLDNLLAQIGDQYADLFLAAKNLSDAILLSDILRVNTEITKAPLSASMIKRYDEHHQDLTLLKALVRQQLPEKYKEIFFDQSKNGYAGYIDGGASQEEFYKFIKPILEKMDGTEELLVKLNREDLLRKQRTFDNGSIPHQIHLGELHAILRRQEDFYPFLKDNREKIEKILTFRIPYYVGPLARGNSRFAWMTRKSEETITPWNFEEVVDKGASAQSFIERMTNFDKNLPNEKVLPKHSLLYEYFTVYNELTKVKYVTEGMRKPAFLSGEQKKAIVDLLFKTNRKVTVKQLKEDYFKKIECFDSVEISGVEDRFNASLGTYHDLLKIIKDKDFLDNEENEDILEDIVLTLTLFEDREMIEERLKTYAHLFDDKVMKQLKRRRYTGWGRLSRKLINGIRDKQSGKTILDFLKSDGFANRNFMQLIHDDSLTFKEDIQKAQVSGQGDSLHEHIANLAGSPAIKKGILQTVKVVDELVKVMGRHKPENIVIEMARENQTTQKGQKNSRERMKRIEEGIKELGSQILKEHPVENTQLQNEKLYLYYLQNGRDMYVDQELDINRLSDYDVDHIVPQSFLKDDSIDNKVLTRSDKNRGKSDNVPSEEVVKKMKNYWRQLLNAKLITQRKFDNLTKAERGGLSELDKAGFIKRQLVETRQITKHVAQILDSRMNTKYDENDKLIREVKVITLKSKLVSDFRKDFQFYKVREINNYHHAHDAYLNAVVGTALIKKYPKLESEFVYGDYKVYDVRKMIAKSEQEGADKRTADGSEFESPKKKRKV

SEQ ID NO: 333 - protein, 1588 aa, synthetic construct
  REGION 1..1588: note = ABE8.8-m polypeptide sequence
  REGION 1..167: note = MISC_FEATURE - Adenosine deaminase sequence
  REGION 168..199: note = MISC_FEATURE - Linker sequence
  REGION 200..1566: note = MISC_FEATURE - Sequence derived from Cas9
  REGION 1567..1588: note = MISC_FEATURE - Bipartite nuclear localization sequence
MSEVEFSHEYWMRHALTLAKRARDEREVPVGAVLVLNNRVIGEGWNRAIGLHDPTAHAEIMALRQGGLVMQNYRLIDATLYVTFEPCVMCAGAMIHSRIGRVVFGVRNAKTGAAGSLMDVLHHPGMNHRVEITEGILADECAALLCRFFRMPRRVFNAQKKAQSSTDSGGSSGGSSGSETPGTSESATPESSGGSSGGSDKKYSIGLAIGTNSVGWAVITDEYKVPSKKFKVLGNTDRHSIKKNLIGALLFDSGETAEATRLKRTARRRYTRRKNRICYLQEIFSNEMAKVDDSFFHRLEESFLVEEDKKHERHPIFGNIVDEVAYHEKYPTIYHLRKKLVDSTDKADLRLIYLALAHMIKFRGHFLIEGDLNPDNSDVDKLFIQLVQTYNQLFEENPINASGVDAKAILSARLSKSRRLENLIAQLPGEKKNGLFGNLIALSLGLTPNFKSNFDLAEDAKLQLSKDTYDDDLDNLLAQIGDQYADLFLAAKNLSDAILLSDILRVNTEITKAPLSASMIKRYDEHHQDLTLLKALVRQQLPEKYKEIFFDQSKNGYAGYIDGGASQEEFYKFIKPILEKMDGTEELLVKLNREDLLRKQRTFDNGSIPHQIHLGELHAILRRQEDFYPFLKDNREKIEKILTFRIPYYVGPLARGNSRFAWMTRKSEETITPWNFEEVVDKGASAQSFIERMTNFDKNLPNEKVLPKHSLLYEYFTVYNELTKVKYVTEGMRKPAFLSGEQKKAIVDLLFKTNRKVTVKQLKEDYFKKIECFDSVEISGVEDRFNASLGTYHDLLKIIKDKDFLDNEENEDILEDIVLTLTLFEDREMIEERLKTYAHLFDDKVMKQLKRRRYTGWGRLSRKLINGIRDKQSGKTILDFLKSDGFANRNFMQLIHDDSLTFKEDIQKAQVSGQGDSLHEHIANLAGSPAIKKGILQTVKVVDELVKVMGRHKPENIVIEMARENQTTQKGQKNSRERMKRIEEGIKELGSQILKEHPVENTQLQNEKLYLYYLQNGRDMYVDQELDINRLSDYDVDHIVPQSFLKDDSIDNKVLTRSDKNRGKSDNVPSEEVVKKMKNYWRQLLNAKLITQRKFDNLTKAERGGLSELDKAGFIKRQLVETRQITKHVAQILDSRMNTKYDENDKLIREVKVITLKSKLVSDFRKDFQFYKVREINNYHHAHDAYLNAVVGTALIKKYPKLESEFVYGDYKVYDVRKMIAKSEQEIGKATAKYFFYSNIMNFFKTEITLANGEIRKRPLIETNGETGEIVWDKGRDFATVRKVLSMPQVNIVKKTEVQTGGFSKESILPKRNSDKLIARKKDWDPKKYGGFDSPTVAYSVLVVAKVEKGKSKKLKSVKELLGITIMERSSFEKNPIDFLEAKGYKEVKKDLIIKLPKYSLFELENGRKRMLASAGELQKGNELALPSKYVNFLYLASHYEKLKGSPEDNEQKQLFVEQHKHYLDEIIEQISEFSKRVILADANLDKVLSAYNKHRDKPIREQAENIIHLFTLTNLGAPAAFKYFDTTIDRKRYTSTKEVLDATLIHQSITGLYETRIDLSQLGGDEGADKRTADGSEFESPKKKRKV

SEQ ID NO: 334 - protein, 1786 aa, synthetic construct
  REGION 1..1786: note = ABE8.8-d polypeptide sequence
  REGION 1..167: note = MISC_FEATURE - Adenosine deaminase sequence
  REGION 168..199: note = MISC_FEATURE - Linker sequence
  REGION 200..365: note = MISC_FEATURE - Adenosine deaminase sequence
  REGION 366..397: note = MISC_FEATURE - Linker sequence
  REGION 398..1764: note = MISC_FEATURE - Sequence derived from Cas9
  REGION 1765..1786: note = MISC_FEATURE - Bipartite nuclear localization sequence
MSEVEFSHEYWMRHALTLAKRAWDEREVPVGAVLVHNNRVIGEGWNRPIGRHDPTAHAEIMALRQGGLVMQNYRLIDATLYVTLEPCVMCAGAMIHSRIGRVVFGARDAKTGAAGSLMDVLHHPGMNHRVEITEGILADECAALLSDFFRMRRQEIKAQKKAQSSTDSGGSSGGSSGSETPGTSESATPESSGGSSGGSSEVEFSHEYWMRHALTLAKRARDEREVPVGAVLVLNNRVIGEGWNRAIGLHDPTAHAEIMALRQGGLVMQNYRLIDATLYVTFEPCVMCAGAMIHSRIGRVVFGVRNAKTGAAGSLMDVLHHPGMNHRVEITEGILADECAALLCRFFRMPRRVFNAQKKAQSSTDSGGSSGGSSGSETPGTSESATPESSGGSSGGSDKKYSIGLAIGTNSVGWAVITDEYKVPSKKFKVLGNTDRHSIKKNLIGALLFDSGETAEATRLKRTARRRYTRRKNRICYLQEIFSNEMAKVDDSFFHRLEESFLVEEDKKHERHPIFGNIVDEVAYHEKYPTIYHLRKKLVDSTDKADLRLIYLALAHMIKFRGHFLIEGDLNPDNSDVDKLFIQLVQTYNQLFEENPINASGVDAKAILSARLSKSRRLENLIAQLPGEKKNGLFGNLIALSLGLTPNFKSNFDLAEDAKLQLSKDTYDDDLDNLLAQIGDQYADLFLAAKNLSDAILLSDILRVNTEITKAPLSASMIKRYDEHHQDLTLLKALVRQQLPEKYKEIFFDQSKNGYAGYIDGGASQEEFYKFIKPILEKMDGTEELLVKLNREDLLRKQRTFDNGSIPHQIHLGELHAILRRQEDFYPFLKDNREKIEKILTFRIPYYVGPLARGNSRFAWMTRKSEETITPWNFEEVVDKGASAQSFIERMTNFDKNLPNEKVLPKHSLLYEYFTVYNELTKVKYVTEGMRKPAFLSGEQKKAIVDLLFKTNRKVTVKQLKEDYFKKIECFDSVEISGVEDRFNASLGTYHDLLKIIKDKDFLDNEENEDILEDIVLTLTLFEDREMIEERLKTYAHLFDDKVMKQLKRRRYTGWGRLSRKLINGIRDKQSGKTILDFLKSDGFANRNFMQLIHDDSLTFKEDIQKAQVSGQGDSLHEHIANLAGSPAIKKGILQTVKVVDELVKVMGRHKPENIVIEMARENQTTQKGQKNSRERMKRIEEGIKELGSQILKEHPVENTQLQNEKLYLYYLQNGRDMYVDQELDINRLSDYDVDHIVPQSFLKDDSIDNKVLTRSDKNRGKSDNVPSEEVVKKMKNYWRQLLNAKLITQRKFDNLTKAERGGLSELDKAGFIKRQLVETRQITKHVAQILDSRMNTKYDENDKLIREVKVITLKSKLVSDFRKDFQFYKVREINNYHHAHDAYLNAVVGTALIKKYPKLESEFVYGDYKVYDVRKMIAKSEQEIGKATAKYFFYSNIMNFFKTEITLANGEIRKRPLIETNGETGEIVWDKGRDFATVRKVLSMPQVNIVKKTEVQTGGFSKESILPKRNSDKLIARKKDWDPKKYGGFDSPTVAYSVLVVAKVEKGKSKKLKSVKELLGITIMERSSFEKNPIDFLEAKGYKEVKKDLIIKLPKYSLFELENGRKRMLASAGELQKGNELALPSKYVNFLYLASHYEKLKGSPEDNEQKQLFVEQHKHYLDEIIEQISEFSKRVILADANLDKVLSAYNKHRDKPIREQAENIIHLFTLTNLGAPAAFKYFDTTIDRKRYTSTKEVLDATLIHQSITGLYETRIDLSQLGGDEGADKRTADGSEFESPKKKRKV

SEQ ID NO: 335 - protein, 1588 aa, synthetic construct
  REGION 1..1588: note = ABE8.13-m polypeptide sequence
  REGION 1..167: note = MISC_FEATURE - Adenosine deaminase sequence
  REGION 168..199: note = MISC_FEATURE - Linker sequence
  REGION 200..1566: note = MISC_FEATURE - Sequence derived from Cas9
  REGION 1567..1588: note = MISC_FEATURE - Bipartite nuclear localization sequence
MSEVEFSHEYWMRHALTLAKRARDEREVPVGAVLVLNNRVIGEGWNRAIGLHDPTAHAEIMALRQGGLVMQNYRLYDATLYVTFEPCVMCAGAMIHSRIGRVVFGVRNAKTGAAGSLMDVLHHPGMNHRVEITEGILADECAALLCRFFRMPRRVFNAQKKAQSSTDSGGSSGGSSGSETPGTSESATPESSGGSSGGSDKKYSIGLAIGTNSVGWAVITDEYKVPSKKFKVLGNTDRHSIKKNLIGALLFDSGETAEATRLKRTARRRYTRRKNRICYLQEIFSNEMAKVDDSFFHRLEESFLVEEDKKHERHPIFGNIVDEVAYHEKYPTIYHLRKKLVDSTDKADLRLIYLALAHMIKFRGHFLIEGDLNPDNSDVDKLFIQLVQTYNQLFEENPINASGVDAKAILSARLSKSRRLENLIAQLPGEKKNGLFGNLIALSLGLTPNFKSNFDLAEDAKLQLSKDTYDDDLDNLLAQIGDQYADLFLAAKNLSDAILLSDILRVNTEITKAPLSASMIKRYDEHHQDLTLLKALVRQQLPEKYKEIFFDQSKNGYAGYIDGGASQEEFYKFIKPILEKMDGTEELLVKLNREDLLRKQRTFDNGSIPHQIHLGELHAILRRQEDFYPFLKDNREKIEKILTFRIPYYVGPLARGNSRFAWMTRKSEETITPWNFEEVVDKGASAQSFIERMTNFDKNLPNEKVLPKHSLLYEYFTVYNELTKVKYVTEGMRKPAFLSGEQKKAIVDLLFKTNRKVTVKQLKEDYFKKIECFDSVEISGVEDRFNASLGTYHDLLKIIKDKDFLDNEENEDILEDIVLTLTLFEDREMIEERLKTYAHLFDDKVMKQLKRRRYTGWGRLSRKLINGIRDKQSGKTILDFLKSDGFANRNFMQLIHDDSLTFKEDIQKAQVSGQGDSLHEHIANLAGSPAIKKGILQTVKVVDELVKVMGRHKPENIVIEMARENQTTQKGQKNSRERMKRIEEGIKELGSQILKEHPVENTQLQNEKLYLYYLQNGRDMYVDQELDINRLSDYDVDHIVPQSFLKDDSIDNKVLTRSDKNRGKSDNVPSEEVVKKMKNYWRQLLNAKLITQRKFDNLTKAERGGLSELDKAGFIKRQLVETRQITKHVAQILDSRMNTKYDENDKLIREVKVITLKSKLVSDFRKDFQFYKVREINNYHHAHDAYLNAVVGTALIKKYPKLESEFVYGDYKVYDVRKMIAKSEQEIGKATAKYFFYSNIMNFFKTEITLANGEIRKRPLIETNGETGEIVWDKGRDFATVRKVLSMPQVNIVKKTEVQTGGFSKESILPKRNSDKLIARKKDWDPKKYGGFDSPTVAYSVLVVAKVEKGKSKKLKSVKELLGITIMERSSFEKNPIDFLEAKGYKEVKKDLIIKLPKYSLFELENGRKRMLASAGELQKGNELALPSKYVNFLYLASHYEKLKGSPEDNEQKQLFVEQHKHYLDEIIEQISEFSKRVILADANLDKVLSAYNKHRDKPIREQAENIIHLFTLTNLGAPAAFKYFDTTIDRKRYTSTKEVLDATLIHQSITGLYETRIDLSQLGGDEGADKRTADGSEFESPKKKRKV

SEQ ID NO: 336 - protein, 1786 aa, synthetic construct
  REGION 1..1786: note = ABE8.13-d polypeptide sequence
  REGION 1..167: note = MISC_FEATURE - Adenosine deaminase sequence
  REGION 168..199: note = MISC_FEATURE - Linker sequence
  REGION 200..365: note = MISC_FEATURE - Adenosine deaminase sequence
  REGION 366..397: note = MISC_FEATURE - Linker sequence
  REGION 398..1764: note = MISC_FEATURE - Sequence derived from Cas9
  REGION 1765..1786: note = MISC_FEATURE - Bipartite nuclear localization sequence
MSEVEFSHEYWMRHALTLAKRAWDEREVPVGAVLVHNNRVIGEGWNRPIGRHDPTAHAEIMALRQGGLVMQNYRLIDATLYVTLEPCVMCAGAMIHSRIGRVVFGARDAKTGAAGSLMDVLHHPGMNHRVEITEGILADECAALLSDFFRMRRQEIKAQKKAQSSTDSGGSSGGSSGSETPGTSESATPESSGGSSGGSSEVEFSHEYWMRHALTLAKRARDEREVPVGAVLVLNNRVIGEGWNRAIGLHDPTAHAEIMALRQGGLVMQNYRLYDATLYVTFEPCVMCAGAMIHSRIGRVVFGVRNAKTGAAGSLMDVLHHPGMNHRVEITEGILADECAALLCRFFRMPRRVFNAQKKAQSSTDSGGSSGGSSGSETPGTSESATPESSGGSSGGSDKKYSIGLAIGTNSVGWAVITDEYKVPSKKFKVLGNTDRHSIKKNLIGALLFDSGETAEATRLKRTARRRYTRRKNRICYLQEIFSNEMAKVDDSFFHRLEESFLVEEDKKHERHPIFGNIVDEVAYHEKYPTIYHLRKKLVDSTDKADLRLIYLALAHMIKFRGHFLIEGDLNPDNSDVDKLFIQLVQTYNQLFEENPINASGVDAKAILSARLSKSRRLENLIAQLPGEKKNGLFGNLIALSLGLTPNFKSNFDLAEDAKLQLSKDTYDDDLDNLLAQIGDQYADLFLAAKNLSDAILLSDILRVNTEITKAPLSASMIKRYDEHHQDLTLLKALVRQQLPEKYKEIFFDQSKNGYAGYIDGGASQEEFYKFIKPILEKMDGTEELLVKLNREDLLRKQRTFDNGSIPHQIHLGELHAILRRQEDFYPFLKDNREKIEKILTFRIPYYVGPLARGNSRFAWMTRKSEETITPWNFEEVVDKGASAQSFIERMTNFDKNLPNEKVLPKHSLLYEYFTVYNELTKVKYVTEGMRKPAFLSGEQKKAIVDLLFKTNRKVTVKQLKEDYFKKIECFDSVEISGVEDRFNASLGTYHDLLKIIKDKDFLDNEENEDILEDIVLTLTLFEDREMIEERLKTYAHLFDDKVMKQLKRRRYTGWGRLSRKLINGIRDKQSGKTILDFLKSDGFANRNFMQLIHDDSLTFKEDIQKAQVSGQGDSLHEHIANLAGSPAIKKGILQTVKVVDELVKVMGRHKPENIVIEMARENQTTQKGQKNSRERMKRIEEGIKELGSQILKEHPVENTQLQNEKLYLYYLQNGRDMYVDQELDINRLSDYDVDHIVPQSFLKDDSIDNKVLTRSDKNRGKSDNVPSEEVVKKMKNYWRQLLNAKLITQRKFDNLTKAERGGLSELDKAGFIKRQLVETRQITKHVAQILDSRMNTKYDENDKLIREVKVITLKSKLVSDFRKDFQFYKVREINNYHHAHDAYLNAVVGTALIKKYPKLESEFVYGDYKVYDVRKMIAKSEQEIGKATAKYFFYSNIMNFFKTEITLANGEIRKRPLIETNGETGEIVWDKGRDFATVRKVLSMPQVNIVKKTEVQTGGFSKESILPKRNSDKLIARKKDWDPKKYGGFDSPTVAYSVLVVAKVEKGKSKKLKSVKELLGITIMERSSFEKNPIDFLEAKGYKEVKKDLIIKLPKYSLFELENGRKRMLASAGELQKGNELALPSKYVNFLYLASHYEKLKGSPEDNEQKQLFVEQHKHYLDEIIEQISEFSKRVILADANLDKVLSAYNKHRDKPIREQAENIIHLFTLTNLGAPAAFKYFDTTIDRKRYTSTKEVLDATLIHQSITGLYETRIDLSQLGGDEGADKRTADGSEFESPKKKRKV

SEQ ID NO: 337 - protein, 1588 aa, synthetic construct
  REGION 1..1588: note = ABE8.17-m polypeptide sequence
  REGION 1..167: note = MISC_FEATURE - Adenosine deaminase sequence
  REGION 168..199: note = MISC_FEATURE - Linker sequence
  REGION 200..1566: note = MISC_FEATURE - Sequence derived from Cas9
  REGION 1567..1588: note = MISC_FEATURE - Bipartite nuclear localization sequence
MSEVEFSHEYWMRHALTLAKRARDEREVPVGAVLVLNNRVIGEGWNRAIGLHDPTAHAEIMALRQGGLVMQNYRLIDATLYSTFEPCVMCAGAMIHSRIGRVVFGVRNAKTGAAGSLMDVLHYPGMNHRVEITEGILADECAALLCYFFRMPRRVFNAQKKAQSSTDSGGSSGGSSGSETPGTSESATPESSGGSSGGSDKKYSIGLAIGTNSVGWAVITDEYKVPSKKFKVLGNTDRHSIKKNLIGALLFDSGETAEATRLKRTARRRYTRRKNRICYLQEIFSNEMAKVDDSFFHRLEESFLVEEDKKHERHPIFGNIVDEVAYHEKYPTIYHLRKKLVDSTDKADLRLIYLALAHMIKFRGHFLIEGDLNPDNSDVDKLFIQLVQTYNQLFEENPINASGVDAKAILSARLSKSRRLENLIAQLPGEKKNGLFGNLIALSLGLTPNFKSNFDLAEDAKLQLSKDTYDDDLDNLLAQIGDQYADLFLAAKNLSDAILLSDILRVNTEITKAPLSASMIKRYDEHHQDLTLLKALVRQQLPEKYKEIFFDQSKNGYAGYIDGGASQEEFYKFIKPILEKMDGTEELLVKLNREDLLRKQRTFDNGSIPHQIHLGELHAILRRQEDFYPFLKDNREKIEKILTFRIPYYVGPLARGNSRFAWMTRKSEETITPWNFEEVVDKGASAQSFIERMTNFDKNLPNEKVLPKHSLLYEYFTVYNELTKVKYVTEGMRKPAFLSGEQKKAIVDLLFKTNRKVTVKQLKEDYFKKIECFDSVEISGVEDRFNASLGTYHDLLKIIKDKDFLDNEENEDILEDIVLTLTLFEDREMIEERLKTYAHLFDDKVMKQLKRRRYTGWGRLSRKLINGIRDKQSGKTILDFLKSDGFANRNFMQLIHDDSLTFKEDIQKAQVSGQGDSLHEHIANLAGSPAIKKGILQTVKVVDELVKVMGRHKPENIVIEMARENQTTQKGQKNSRERMKRIEEGIKELGSQILKEHPVENTQLQNEKLYLYYLQNGRDMYVDQELDINRLSDYDVDHIVPQSFLKDDSIDNKVLTRSDKNRGKSDNVPSEEVVKKMKNYWRQLLNAKLITQRKFDNLTKAERGGLSELDKAGFIKRQLVETRQITKHVAQILDSRMNTKYDENDKLIREVKVITLKSKLVSDFRKDFQFYKVREINNYHHAHDAYLNAVVGTALIKKYPKLESEFVYGDYKVYDVRKMIAKSEQEIGKATAKYFFYSNIMNFFKTEITLANGEIRKRPLIETNGETGEIVWDKGRDFATVRKVLSMPQVNIVKKTEVQTGGFSKESILPKRNSDKLIARKKDWDPKKYGGFDSPTVAYSVLVVAKVEKGKSKKLKSVKELLGITIMERSSFEKNPIDFLEAKGYKEVKKDLIIKLPKYSLFELENGRKRMLASAGELQKGNELALPSKYVNFLYLASHYEKLKGSPEDNEQKQLFVEQHKHYLDEIIEQISEFSKRVILADANLDKVLSAYNKHRDKPIREQAENIIHLFTLTNLGAPAAFKYFDTTIDRKRYTSTKEVLDATLIHQSITGLYETRIDLSQLGGDEGADKRTADGSEFESPKKKRKV

SEQ ID NO: 338 - protein, 1786 aa, synthetic construct
  REGION 1..1786: note = ABE8.17-d polypeptide sequence
  REGION 1..167: note = MISC_FEATURE - Adenosine deaminase sequence
  REGION 168..199: note = MISC_FEATURE - Linker sequence
  REGION 200..365: note = MISC_FEATURE - Adenosine deaminase sequence
  REGION 366..397: note = MISC_FEATURE - Linker sequence
  REGION 398..1764: note = MISC_FEATURE - Sequence derived from Cas9
  REGION 1765..1786: note = MISC_FEATURE - Bipartite nuclear localization sequence
MSEVEFSHEYWMRHALTLAKRAWDEREVPVGAVLVHNNRVIGEGWNRPIGRHDPTAHAEIMALRQGGLVMQNYRLIDATLYVTLEPCVMCAGAMIHSRIGRVVFGARDAKTGAAGSLMDVLHHPGMNHRVEITEGILADECAALLSDFFRMRRQEIKAQKKAQSSTDSGGSSGGSSGSETPGTSESATPESSGGSSGGSSEVEFSHEYWMRHALTLAKRARDEREVPVGAVLVLNNRVIGEGWNRAIGLHDPTAHAEIMALRQGGLVMQNYRLIDATLYSTFEPCVMCAGAMIHSRIGRVVFGVRNAKTGAAGSLMDVLHYPGMNHRVEITEGILADECAALLCYFFRMPRRVFNAQKKAQSSTDSGGSSGGSSGSETPGTSESATPESSGGSSGGSDKKYSIGLAIGTNSVGWAVITDEYKVPSKKFKVLGNTDRHSIKKNLIGALLFDSGETAEATRLKRTARRRYTRRKNRICYLQEIFSNEMAKVDDSFFHRLEESFLVEEDKKHERHPIFGNIVDEVAYHEKYPTIYHLRKKLVDSTDKADLRLIYLALAHMIKFRGHFLIEGDLNPDNSDVDKLFIQLVQTYNQLFEENPINASGVDAKAILSARLSKSRRLENLIAQLPGEKKNGLFGNLIALSLGLTPNFKSNFDLAEDAKLQLSKDTYDDDLDNLLAQIGDQYADLFLAAKNLSDAILLSDILRVNTEITKAPLSASMIKRYDEHHQDLTLLKALVRQQLPEKYKEIFFDQSKNGYAGYIDGGASQEEFYKFIKPILEKMDGTEELLVKLNREDLLRKQRTFDNGSIPHQIHLGELHAILRRQEDFYPFLKDNREKIEKILTFRIPYYVGPLARGNSRFAWMTRKSEETITPWNFEEVVDKGASAQSFIERMTNFDKNLPNEKVLPKHSLLYEYFTVYNELTKVKYVTEGMRKPAFLSGEQKKAIVDLLFKTNRKVTVKQLKEDYFKKIECFDSVEISGVEDRFNASLGTYHDLLKIIKDKDFLDNEENEDILEDIVLTLTLFEDREMIEERLKTYAHLFDDKVMKQLKRRRYTGWGRLSRKLINGIRDKQSGKTILDFLKSDGFANRNFMQLIHDDSLTFKEDIQKAQVSGQGDSLHEHIANLAGSPAIKKGILQTVKVVDELVKVMGRHKPENIVIEMARENQTTQKGQKNSRERMKRIEEGIKELGSQILKEHPVENTQLQNEKLYLYYLQNGRDMYVDQELDINRLSDYDVDHIVPQSFLKDDSIDNKVLTRSDKNRGKSDNVPSEEVVKKMKNYWRQLLNAKLITQRKFDNLTKAERGGLSELDKAGFIKRQLVETRQITKHVAQILDSRMNTKYDENDKLIREVKVITLKSKLVSDFRKDFQFYKVREINNYHHAHDAYLNAVVGTALIKKYPKLESEFVYGDYKVYDVRKMIAKSEQEIGKATAKYFFYSNIMNFFKTEITLANGEIRKRPLIETNGETGEIVWDKGRDFATVRKVLSMPQVNIVKKTEVQTGGFSKESILPKRNSDKLIARKKDWDPKKYGGFDSPTVAYSVLVVAKVEKGKSKKLKSVKELLGITIMERSSFEKNPIDFLEAKGYKEVKKDLIIKLPKYSLFELENGRKRMLASAGELQKGNELALPSKYVNFLYLASHYEKLKGSPEDNEQKQLFVEQHKHYLDEIIEQISEFSKRVILADANLDKVLSAYNKHRDKPIREQAENIIHLFTLTNLGAPAAFKYFDTTIDRKRYTSTKEVLDATLIHQSITGLYETRIDLSQLGGDEGADKRTADGSEFESPKKKRKV

SEQ ID NO: 339 - protein, 1588 aa, synthetic construct
  REGION 1..1588: note = ABE8.20-m polypeptide sequence
  REGION 1..167: note = MISC_FEATURE - Adenosine deaminase sequence
  REGION 168..199: note = MISC_FEATURE - Linker sequence
  REGION 200..1566: note = MISC_FEATURE - Sequence derived from Cas9
  REGION 1567..1588: note = MISC_FEATURE - Bipartite nuclear localization sequence
MSEVEFSHEYWMRHALTLAKRARDEREVPVGAVLVLNNRVIGEGWNRAIGLHDPTAHAEIMALRQGGLVMQNYRLYDATLYSTFEPCVMCAGAMIHSRIGRVVFGVRNAKTGAAGSLMDVLHHPGMNHRVEITEGILADECAALLCRFFRMPRRVFNAQKKAQSSTDSGGSSGGSSGSETPGTSESATPESSGGSSGGSDKKYSIGLAIGTNSVGWAVITDEYKVPSKKFKVLGNTDRHSIKKNLIGALLFDSGETAEATRLKRTARRRYTRRKNRICYLQEIFSNEMAKVDDSFFHRLEESFLVEEDKKHERHPIFGNIVDEVAYHEKYPTIYHLRKKLVDSTDKADLRLIYLALAHMIKFRGHFLIEGDLNPDNSDVDKLFIQLVQTYNQLFEENPINASGVDAKAILSARLSKSRRLENLIAQLPGEKKNGLFGNLIALSLGLTPNFKSNFDLAEDAKLQLSKDTYDDDLDNLLAQIGDQYADLFLAAKNLSDAILLSDILRVNTEITKAPLSASMIKRYDEHHQDLTLLKALVRQQLPEKYKEIFFDQSKNGYAGYIDGGASQEEFYKFIKPILEKMDGTEELLVKLNREDLLRKQRTFDNGSIPHQIHLGELHAILRRQEDFYPFLKDNREKIEKILTFRIPYYVGPLARGNSRFAWMTRKSEETITPWNFEEVVDKGASAQSFIERMTNFDKNLPNEKVLPKHSLLYEYFTVYNELTKVKYVTEGMRKPAFLSGEQKKAIVDLLFKTNRKVTVKQLKEDYFKKIECFDSVEISGVEDRFNASLGTYHDLLKIIKDKDFLDNEENEDILEDIVLTLTLFEDREMIEERLKTYAHLFDDKVMKQLKRRRYTGWGRLSRKLINGIRDKQSGKTILDFLKSDGFANRNFMQLIHDDSLTFKEDIQKAQVSGQGDSLHEHIANLAGSPAIKKGILQTVKVVDELVKVMGRHKPENIVIEMARENQTTQKGQKNSRERMKRIEEGIKELGSQILKEHPVENTQLQNEKLYLYYLQNGRDMYVDQELDINRLSDYDVDHIVPQSFLKDDSIDNKVLTRSDKNRGKSDNVPSEEVVKKMKNYWRQLLNAKLITQRKFDNLTKAERGGLSELDKAGFIKRQLVETRQITKHVAQILDSRMNTKYDENDKLIREVKVITLKSKLVSDFRKDFQFYKVREINNYHHAHDAYLNAVVGTALIKKYPKLESEFVYGDYKVYDVRKMIAKSEQEIGKATAKYFFYSNIMNFFKTEITLANGEIRKRPLIETNGETGEIVWDKGRDFATVRKVLSMPQVNIVKKTEVQTGGFSKESILPKRNSDKLIARKKDWDPKKYGGFDSPTVAYSVLVVAKVEKGKSKKLKSVKELLGITIMERSSFEKNPIDFLEAKGYKEVKKDLIIKLPKYSLFELENGRKRMLASAGELQKGNELALPSKYVNFLYLASHYEKLKGSPEDNEQKQLFVEQHKHYLDEIIEQISEFSKRVILADANLDKVLSAYNKHRDKPIREQAENIIHLFTLTNLGAPAAFKYFDTTIDRKRYTSTKEVLDATLIHQSITGLYETRIDLSQLGGDEGADKRTADGSEFESPKKKRKV

SEQ ID NO: 340 - protein, 1786 aa, synthetic construct
  REGION 1..1786: note = ABE8.20-d polypeptide sequence
  REGION 1..167: note = MISC_FEATURE - Adenosine deaminase sequence
  REGION 168..199: note = MISC_FEATURE - Linker sequence
  REGION 200..365: note = MISC_FEATURE - Adenosine deaminase sequence
  REGION 366..397: note = MISC_FEATURE - Linker sequence
  REGION 398..1764: note = MISC_FEATURE - Sequence derived from Cas9
  REGION 1765..1786: note = MISC_FEATURE - Bipartite nuclear localization sequence
MSEVEFSHEYWMRHALTLAKRAWDEREVPVGAVLVHNNRVIGEGWNRPIGRHDPTAHAEIMALRQGGLVMQNYRLIDATLYVTLEPCVMCAGAMIHSRIGRVVFGARDAKTGAAGSLMDVLHHPGMNHRVEITEGILADECAALLSDFFRMRRQEIKAQKKAQSSTDSGGSSGGSSGSETPGTSESATPESSGGSSGGSSEVEFSHEYWMRHALTLAKRARDEREVPVGAVLVLNNRVIGEGWNRAIGLHDPTAHAEIMALRQGGLVMQNYRLYDATLYSTFEPCVMCAGAMIHSRIGRVVFGVRNAKTGAAGSLMDVLHHPGMNHRVEITEGILADECAALLCRFFRMPRRVFNAQKKAQSSTDSGGSSGGSSGSETPGTSESATPESSGGSSGGSDKKYSIGLAIGTNSVGWAVITDEYKVPSKKFKVLGNTDRHSIKKNLIGALLFDSGETAEATRLKRTARRRYTRRKNRICYLQEIFSNEMAKVDDSFFHRLEESFLVEEDKKHERHPIFGNIVDEVAYHEKYPTIYHLRKKLVDSTDKADLRLIYLALAHMIKFRGHFLIEGDLNPDNSDVDKLFIQLVQTYNQLFEENPINASGVDAKAILSARLSKSRRLENLIAQLPGEKKNGLFGNLIALSLGLTPNFKSNFDLAEDAKLQLSKDTYDDDLDNLLAQIGDQYADLFLAAKNLSDAILLSDILRVNTEITKAPLSASMIKRYDEHHQDLTLLKALVRQQLPEKYKEIFFDQSKNGYAGYIDGGASQEEFYKFIKPILEKMDGTEELLVKLNREDLLRKQRTFDNGSIPHQIHLGELHAILRRQEDFYPFLKDNREKIEKILTFRIPYYVGPLARGNSRFAWMTRKSEETITPWNFEEVVDKGASAQSFIERMTNFDKNLPNEKVLPKHSLLYEYFTVYNELTKVKYVTEGMRKPAFLSGEQKKAIVDLLFKTNRKVTVKQLKEDYFKKIECFDSVEISGVEDRFNASLGTYHDLLKIIKDKDFLDNEENEDILEDIVLTLTLFEDREMIEERLKTYAHLFDDKVMKQLKRRRYTGWGRLSRKLINGIRDKQSGKTILDFLKSDGFANRNFMQLIHDDSLTFKEDIQKAQVSGQGDSLHEHIANLAGSPAIKKGILQTVKVVDELVKVMGRHKPENIVIEMARENQTTQKGQKNSRERMKRIEEGIKELGSQILKEHPVENTQLQNEKLYLYYLQNGRDMYVDQELDINRLSDYDVDHIVPQSFLKDDSIDNKVLTRSDKNRGKSDNVPSEEVVKKMKNYWRQLLNAKLITQRKFDNLTKAERGGLSELDKAGFIKRQLVETRQITKHVAQILDSRMNTKYDENDKLIREVKVITLKSKLVSDFRKDFQFYKVREINNYHHAHDAYLNAVVGTALIKKYPKLESEFVYGDYKVYDVRKMIAKSEQEIGKATAKYFFYSNIMNFFKTEITLANGEIRKRPLIETNGETGEIVWDKGRDFATVRKVLSMPQVNIVKKTEVQTGGFSKESILPKRNSDKLIARKKDWDPKKYGGFDSPTVAYSVLVVAKVEKGKSKKLKSVKELLGITIMERSSFEKNPIDFLEAKGYKEVKKDLIIKLPKYSLFELENGRKRMLASAGELQKGNELALPSKYVNFLYLASHYEKLKGSPEDNEQKQLFVEQHKHYLDEIIEQISEFSKRVILADANLDKVLSAYNKHRDKPIREQAENIIHLFTLTNLGAPAAFKYFDTTIDRKRYTSTKEVLDATLIHQSITGLYETRIDLSQLGGDEGADKRTADGSEFESPKKKRKV

SEQ ID NO: 341 - protein, 1588 aa, synthetic construct
  REGION 1..1588: note = 01. monoABE8.1_bpNLS + Y147T polypeptide sequence
MSEVEFSHEYWMRHALTLAKRARDEREVPVGAVLVLNNRVIGEGWNRAIGLHDPTAHAEIMALRQGGLVMQNYRLIDATLYVTFEPCVMCAGAMIHSRIGRVVFGVRNAKTGAAGSLMDVLHYPGMNHRVEITEGILADECAALLCTFFRMPRQVFNAQKKAQSSTDSGGSSGGSSGSETPGTSESATPESSGGSSGGSDKKYSIGLAIGTNSVGWAVITDEYKVPSKKFKVLGNTDRHSIKKNLIGALLFDSGETAEATRLKRTARRRYTRRKNRICYLQEIFSNEMAKVDDSFFHRLEESFLVEEDKKHERHPIFGNIVDEVAYHEKYPTIYHLRKKLVDSTDKADLRLIYLALAHMIKFRGHFLIEGDLNPDNSDVDKLFIQLVQTYNQLFEENPINASGVDAKAILSARLSKSRRLENLIAQLPGEKKNGLFGNLIALSLGLTPNFKSNFDLAEDAKLQLSKDTYDDDLDNLLAQIGDQYADLFLAAKNLSDAILLSDILRVNTEITKAPLSASMIKRYDEHHQDLTLLKALVRQQLPEKYKEIFFDQSKNGYAGYIDGGASQEEFYKFIKPILEKMDGTEELLVKLNREDLLRKQRTFDNGSIPHQIHLGELHAILRRQEDFYPFLKDNREKIEKILTFRIPYYVGPLARGNSRFAWMTRKSEETITPWNFEEVVDKGASAQSFIERMTNFDKNLPNEKVLPKHSLLYEYFTVYNELTKVKYVTEGMRKPAFLSGEQKKAIVDLLFKTNRKVTVKQLKEDYFKKIECFDSVEISGVEDRFNASLGTYHDLLKIIKDKDFLDNEENEDILEDIVLTLTLFEDREMIEERLKTYAHLFDDKVMKQLKRRRYTGWGRLSRKLINGIRDKQSGKTILDFLKSDGFANRNFMQLIHDDSLTFKEDIQKAQVSGQGDSLHEHIANLAGSPAIKKGILQTVKVVDELVKVMGRHKPENIVIEMARENQTTQKGQKNSRERMKRIEEGIKELGSQILKEHPVENTQLQNEKLYLYYLQNGRDMYVDQELDINRLSDYDVDHIVPQSFLKDDSIDNKVLTRSDKNRGKSDNVPSEEVVKKMKNYWRQLLNAKLITQRKFDNLTKAERGGLSELDKAGFIKRQLVETRQITKHVAQILDSRMNTKYDENDKLIREVKVITLKSKLVSDFRKDFQFYKVREINNYHHAHDAYLNAVVGTALIKKYPKLESEFVYGDYKVYDVRKMIAKSEQEIGKATAKYFFYSNIMNFFKTEITLANGEIRKRPLIETNGETGEIVWDKGRDFATVRKVLSMPQVNIVKKTEVQTGGFSKESILPKRNSDKLIARKKDWDPKKYGGFVSPTVAYSVLVVAKVEKGKSKKLKSVKELLGITIMERSSFEKNPIDFLEAKGYKEVKKDLIIKLPKYSLFELENGRKRMLASARELQKGNELALPSKYVNFLYLASHYEKLKGSPEDNEQKQLFVEQHKHYLDEIIEQISEFSKRVILADANLDKVLSAYNKHRDKPIREQAENIIHLFTLTNLGAPAAFKYFDTTIDRKQYRSTKEVLDATLIHQSITGLYETRIDLSQLGGDEGADKRTADGSEFESPKKKRKV

SEQ ID NO: 342 - protein, 1588 aa, synthetic construct
  REGION 1..1588: note = 02. monoABE8.1_bpNLS + Y147R polypeptide sequence
MSEVEFSHEYWMRHALTLAKRARDEREVPVGAVLVLNNRVIGEGWNRAIGLHDPTAHAEIMALRQGGLVMQNYRLIDATLYVTFEPCVMCAGAMIHSRIGRVVFGVRNAKTGAAGSLMDVLHYPGMNHRVEITEGILADECAALLCRFFRMPRQVFNAQKKAQSSTDSGGSSGGSSGSETPGTSESATPESSGGSSGGSDKKYSIGLAIGTNSVGWAVITDEYKVPSKKFKVLGNTDRHSIKKNLIGALLFDSGETAEATRLKRTARRRYTRRKNRICYLQEIFSNEMAKVDDSFFHRLEESFLVEEDKKHERHPIFGNIVDEVAYHEKYPTIYHLRKKLVDSTDKADLRLIYLALAHMIKFRGHFLIEGDLNPDNSDVDKLFIQLVQTYNQLFEENPINASGVDAKAILSARLSKSRRLENLIAQLPGEKKNGLFGNLIALSLGLTPNFKSNFDLAEDAKLQLSKDTYDDDLDNLLAQIGDQYADLFLAAKNLSDAILLSDILRVNTEITKAPLSASMIKRYDEHHQDLTLLKALVRQQLPEKYKEIFFDQSKNGYAGYIDGGASQEEFYKFIKPILEKMDGTEELLVKLNREDLLRKQRTFDNGSIPHQIHLGELHAILRRQEDFYPFLKDNREKIEKILTFRIPYYVGPLARGNSRFAWMTRKSEETITPWNFEEVVDKGASAQSFIERMTNFDKNLPNEKVLPKHSLLYEYFTVYNELTKVKYVTEGMRKPAFLSGEQKKAIVDLLFKTNRKVTVKQLKEDYFKKIECFDSVEISGVEDRFNASLGTYHDLLKIIKDKDFLDNEENEDILEDIVLTLTLFEDREMIEERLKTYAHLFDDKVMKQLKRRRYTGWGRLSRKLINGIRDKQSGKTILDFLKSDGFANRNFMQLIHDDSLTFKEDIQKAQVSGQGDSLHEHIANLAGSPAIKKGILQTVKVVDELVKVMGRHKPENIVIEMARENQTTQKGQKNSRERMKRIEEGIKELGSQILKEHPVENTQLQNEKLYLYYLQNGRDMYVDQELDINRLSDYDVDHIVPQSFLKDDSIDNKVLTRSDKNRGKSDNVPSEEVVKKMKNYWRQLLNAKLITQRKFDNLTKAERGGLSELDKAGFIKRQLVETRQITKHVAQILDSRMNTKYDENDKLIREVKVITLKSKLVSDFRKDFQFYKVREINNYHHAHDAYLNAVVGTALIKKYPKLESEFVYGDYKVYDVRKMIAKSEQEIGKATAKYFFYSNIMNFFKTEITLANGEIRKRPLIETNGETGEIVWDKGRDFATVRKVLSMPQVNIVKKTEVQTGGFSKESILPKRNSDKLIARKKDWDPKKYGGFVSPTVAYSVLVVAKVEKGKSKKLKSVKELLGITIMERSSFEKNPIDFLEAKGYKEVKKDLIIKLPKYSLFELENGRKRMLASARELQKGNELALPSKYVNFLYLASHYEKLKGSPEDNEQKQLFVEQHKHYLDEIIEQISEFSKRVILADANLDKVLSAYNKHRDKPIREQAENIIHLFTLTNLGAPAAFKYFDTTIDRKQYRSTKEVLDATLIHQSITGLYETRIDLSQLGGDEGADKRTADGSEFESPKKKRKV

SEQ ID NO: 343 - protein, 1588 aa, synthetic construct
  REGION 1..1588: note = 03. monoABE8.1_bpNLS + Q154S polypeptide sequence
MSEVEFSHEYWMRHALTLAKRARDEREVPVGAVLVLNNRVIGEGWNRAIGLHDPTAHAEIMALRQGGLVMQNYRLIDATLYVTFEPCVMCAGAMIHSRIGRVVFGVRNAKTGAAGSLMDVLHYPGMNHRVEITEGILADECAALLCYFFRMPRSVFNAQKKAQSSTDSGGSSGGSSGSETPGTSESATPESSGGSSGGSDKKYSIGLAIGTNSVGWAVITDEYKVPSKKFKVLGNTDRHSIKKNLIGALLFDSGETAEATRLKRTARRRYTRRKNRICYLQEIFSNEMAKVDDSFFHRLEESFLVEEDKKHERHPIFGNIVDEVAYHEKYPTIYHLRKKLVDSTDKADLRLIYLALAHMIKFRGHFLIEGDLNPDNSDVDKLFIQLVQTYNQLFEENPINASGVDAKAILSARLSKSRRLENLIAQLPGEKKNGLFGNLIALSLGLTPNFKSNFDLAEDAKLQLSKDTYDDDLDNLLAQIGDQYADLFLAAKNLSDAILLSDILRVNTEITKAPLSASMIKRYDEHHQDLTLLKALVRQQLPEKYKEIFFDQSKNGYAGYIDGGASQEEFYKFIKPILEKMDGTEELLVKLNREDLLRKQRTFDNGSIPHQIHLGELHAILRRQEDFYPFLKDNREKIEKILTFRIPYYVGPLARGNSRFAWMTRKSEETITPWNFEEVVDKGASAQSFIERMTNFDKNLPNEKVLPKHSLLYEYFTVYNELTKVKYVTEGMRKPAFLSGEQKKAIVDLLFKTNRKVTVKQLKEDYFKKIECFDSVEISGVEDRFNASLGTYHDLLKIIKDKDFLDNEENEDILEDIVLTLTLFEDREMIEERLKTYAHLFDDKVMKQLKRRRYTGWGRLSRKLINGIRDKQSGKTILDFLKSDGFANRNFMQLIHDDSLTFKEDIQKAQVSGQGDSLHEHIANLAGSPAIKKGILQTVKVVDELVKVMGRHKPENIVIEMARENQTTQKGQKNSRERMKRIEEGIKELGSQILKEHPVENTQLQNEKLYLYYLQNGRDMYVDQELDINRLSDYDVDHIVPQSFLKDDSIDNKVLTRSDKNRGKSDNVPSEEVVKKMKNYWRQLLNAKLITQRKFDNLTKAERGGLSELDKAGFIKRQLVETRQITKHVAQILDSRMNTKYDENDKLIREVKVITLKSKLVSDFRKDFQFYKVREINNYHHAHDAYLNAVVGTALIKKYPKLESEFVYGDYKVYDVRKMIAKSEQEIGKATAKYFFYSNIMNFFKTEITLANGEIRKRPLIETNGETGEIVWDKGRDFATVRKVLSMPQVNIVKKTEVQTGGFSKESILPKRNSDKLIARKKDWDPKKYGGFVSPTVAYSVLVVAKVEKGKSKKLKSVKELLGITIMERSSFEKNPIDFLEAKGYKEVKKDLIIKLPKYSLFELENGRKRMLASARELQKGNELALPSKYVNFLYLASHYEKLKGSPEDNEQKQLFVEQHKHYLDEIIEQISEFSKRVILADANLDKVLSAYNKHRDKPIREQAENIIHLFTLTNLGAPAAFKYFDTTIDRKQYRSTKEVLDATLIHQSITGLYETRIDLSQLGGDEGADKRTADGSEFESPKKKRKV

SEQ ID NO: 344 - protein, 1588 aa, synthetic construct
  REGION 1..1588: note = 04. monoABE8.1_bpNLS + Y123H polypeptide sequence
MSEVEFSHEYWMRHALTLAKRARDEREVPVGAVLVLNNRVIGEGWNRAIGLHDPTAHAEIMALRQGGLVMQNYRLIDATLYVTFEPCVMCAGAMIHSRIGRVVFGVRNAKTGAAGSLMDVLHHPGMNHRVEITEGILADECAALLCYFFRMPRQVFNAQKKAQSSTDSGGSSGGSSGSETPGTSESATPESSGGSSGGSDKKYSIGLAIGTNSVGWAVITDEYKVPSKKFKVLGNTDRHSIKKNLIGALLFDSGETAEATRLKRTARRRYTRRKNRICYLQEIFSNEMAKVDDSFFHRLEESFLVEEDKKHERHPIFGNIVDEVAYHEKYPTIYHLRKKLVDSTDKADLRLIYLALAHMIKFRGHFLIEGDLNPDNSDVDKLFIQLVQTYNQLFEENPINASGVDAKAILSARLSKSRRLENLIAQLPGEKKNGLFGNLIALSLGLTPNFKSNFDLAEDAKLQLSKDTYDDDLDNLLAQIGDQYADLFLAAKNLSDAILLSDILRVNTEITKAPLSASMIKRYDEHHQDLTLLKALVRQQLPEKYKEIFFDQSKNGYAGYIDGGASQEEFYKFIKPILEKMDGTEELLVKLNREDLLRKQRTFDNGSIPHQIHLGELHAILRRQEDFYPFLKDNREKIEKILTFRIPYYVGPLARGNSRFAWMTRKSEETITPWNFEEVVDKGASAQSFIERMTNFDKNLPNEKVLPKHSLLYEYFTVYNELTKVKYVTEGMRKPAFLSGEQKKAIVDLLFKTNRKVTVKQLKEDYFKKIECFDSVEISGVEDRFNASLGTYHDLLKIIKDKDFLDNEENEDILEDIVLTLTLFEDREMIEERLKTYAHLFDDKVMKQLKRRRYTGWGRLSRKLINGIRDKQSGKTILDFLKSDGFANRNFMQLIHDDSLTFKEDIQKAQVSGQGDSLHEHIANLAGSPAIKKGILQTVKVVDELVKVMGRHKPENIVIEMARENQTTQKGQKNSRERMKRIEEGIKELGSQILKEHPVENTQLQNEKLYLYYLQNGRDMYVDQELDINRLSDYDVDHIVPQSFLKDDSIDNKVLTRSDKNRGKSDNVPSEEVVKKMKNYWRQLLNAKLITQRKFDNLTKAERGGLSELDKAGFIKRQLVETRQITKHVAQILDSRMNTKYDENDKLIREVKVITLKSKLVSDFRKDFQFYKVREINNYHHAHDAYLNAVVGTALIKKYPKLESEFVYGDYKVYDVRKMIAKSEQEIGKATAKYFFYSNIMNFFKTEITLANGEIRKRPLIETNGETGEIVWDKGRDFATVRKVLSMPQVNIVKKTEVQTGGFSKESILPKRNSDKLIARKKDWDPKKYGGFVSPTVAYSVLVVAKVEKGKSKKLKSVKELLGITIMERSSFEKNPIDFLEAKGYKEVKKDLIIKLPKYSLFELENGRKRMLASARELQKGNELALPSKYVNFLYLASHYEKLKGSPEDNEQKQLFVEQHKHYLDEIIEQISEFSKRVILADANLDKVLSAYNKHRDKPIREQAENIIHLFTLTNLGAPAAFKYFDTTIDRKQYRSTKEVLDATLIHQSITGLYETRIDLSQLGGDEGADKRTADGSEFESPKKKRKV

SEQ ID NO: 345 - protein, 1588 aa, synthetic construct
  REGION 1..1588: note = 05. monoABE8.1_bpNLS + V82S polypeptide sequence
MSEVEFSHEYWMRHALTLAKRARDEREVPVGAVLVLNNRVIGEGWNRAIGLHDPTAHAEIMALRQGGLVMQNYRLIDATLYSTFEPCVMCAGAMIHSRIGRVVFGVRNAKTGAAGSLMDVLHYPGMNHRVEITEGILADECAALLCYFFRMPRQVFNAQKKAQSSTDSGGSSGGSSGSETPGTSESATPESSGGSSGGSDKKYSIGLAIGTNSVGWAVITDEYKVPSKKFKVLGNTDRHSIKKNLIGALLFDSGETAEATRLKRTARRRYTRRKNRICYLQEIFSNEMAKVDDSFFHRLEESFLVEEDKKHERHPIFGNIVDEVAYHEKYPTIYHLRKKLVDSTDKADLRLIYLALAHMIKFRGHFLIEGDLNPDNSDVDKLFIQLVQTYNQLFEENPINASGVDAKAILSARLSKSRRLENLIAQLPGEKKNGLFGNLIALSLGLTPNFKSNFDLAEDAKLQLSKDTYDDDLDNLLAQIGDQYADLFLAAKNLSDAILLSDILRVNTEITKAPLSASMIKRYDEHHQDLTLLKALVRQQLPEKYKEIFFDQSKNGYAGYIDGGASQEEFYKFIKPILEKMDGTEELLVKLNREDLLRKQRTFDNGSIPHQIHLGELHAILRRQEDFYPFLKDNREKIEKILTFRIPYYVGPLARGNSRFAWMTRKSEETITPWNFEEVVDKGASAQSFIERMTNFDKNLPNEKVLPKHSLLYEYFTVYNELTKVKYVTEGMRKPAFLSGEQKKAIVDLLFKTNRKVTVKQLKEDYFKKIECFDSVEISGVEDRFNASLGTYHDLLKIIKDKDFLDNEENEDILEDIVLTLTLFEDREMIEERLKTYAHLFDDKVMKQLKRRRYTGWGRLSRKLINGIRDKQSGKTILDFLKSDGFANRNFMQLIHDDSLTFKEDIQKAQVSGQGDSLHEHIANLAGSPAIKKGILQTVKVVDELVKVMGRHKPENIVIEMARENQTTQKGQKNSRERMKRIEEGIKELGSQILKEHPVENTQLQNEKLYLYYLQNGRDMYVDQELDINRLSDYDVDHIVPQSFLKDDSIDNKVLTRSDKNRGKSDNVPSEEVVKKMKNYWRQLLNAKLITQRKFDNLTKAERGGLSELDKAGFIKRQLVETRQITKHVAQILDSRMNTKYDENDKLIREVKVITLKSKLVSDFRKDFQFYKVREINNYHHAHDAYLNAVVGTALIKKYPKLESEFVYGDYKVYDVRKMIAKSEQEIGKATAKYFFYSNIMNFFKTEITLANGEIRKRPLIETNGETGEIVWDKGRDFATVRKVLSMPQVNIVKKTEVQTGGFSKESILPKRNSDKLIARKKDWDPKKYGGFVSPTVAYSVLVVAKVEKGKSKKLKSVKELLGITIMERSSFEKNPIDFLEAKGYKEVKKDLIIKLPKYSLFELENGRKRMLASARELQKGNELALPSKYVNFLYLASHYEKLKGSPEDNEQKQLFVEQHKHYLDEIIEQISEFSKRVILADANLDKVLSAYNKHRDKPIREQAENIIHLFTLTNLGAPAAFKYFDTTIDRKQYRSTKEVLDATLIHQSITGLYETRIDLSQLGGDEGADKRTADGSEFESPKKKRKV

SEQ ID NO: 346 - protein, 1588 aa, synthetic construct
  REGION 1..1588: note = 06. monoABE8.1_bpNLS + T166R polypeptide sequence
MSEVEFSHEYWMRHALTLAKRARDEREVPVGAVLVLNNRVIGEGWNRAIGLHDPTAHAEIMALRQGGLVMQNYRLIDATLYVTFEPCVMCAGAMIHSRIGRVVFGVRNAKTGAAGSLMDVLHYPGMNHRVEITEGILADECAALLCYFFRMPRQVFNAQKKAQSSRDSGGSSGGSSGSETPGTSESATPESSGGSSGGSDKKYSIGLAIGTNSVGWAVITDEYKVPSKKFKVLGNTDRHSIKKNLIGALLFDSGETAEATRLKRTARRRYTRRKNRICYLQEIFSNEMAKVDDSFFHRLEESFLVEEDKKHERHPIFGNIVDEVAYHEKYPTIYHLRKKLVDSTDKADLRLIYLALAHMIKFRGHFLIEGDLNPDNSDVDKLFIQLVQTYNQLFEENPINASGVDAKAILSARLSKSRRLENLIAQLPGEKKNGLFGNLIALSLGLTPNFKSNFDLAEDAKLQLSKDTYDDDLDNLLAQIGDQYADLFLAAKNLSDAILLSDILRVNTEITKAPLSASMIKRYDEHHQDLTLLKALVRQQLPEKYKEIFFDQSKNGYAGYIDGGASQEEFYKFIKPILEKMDGTEELLVKLNREDLLRKQRTFDNGSIPHQIHLGELHAILRRQEDFYPFLKDNREKIEKILTFRIPYYVGPLARGNSRFAWMTRKSEETITPWNFEEVVDKGASAQSFIERMTNFDKNLPNEKVLPKHSLLYEYFTVYNELTKVKYVTEGMRKPAFLSGEQKKAIVDLLFKTNRKVTVKQLKEDYFKKIECFDSVEISGVEDRFNASLGTYHDLLKIIKDKDFLDNEENEDILEDIVLTLTLFEDREMIEERLKTYAHLFDDKVMKQLKRRRYTGWGRLSRKLINGIRDKQSGKTILDFLKSDGFANRNFMQLIHDDSLTFKEDIQKAQVSGQGDSLHEHIANLAGSPAIKKGILQTVKVVDELVKVMGRHKPENIVIEMARENQTTQKGQKNSRERMKRIEEGIKELGSQILKEHPVENTQLQNEKLYLYYLQNGRDMYVDQELDINRLSDYDVDHIVPQSFLKDDSIDNKVLTRSDKNRGKSDNVPSEEVVKKMKNYWRQLLNAKLITQRKFDNLTKAERGGLSELDKAGFIKRQLVETRQITKHVAQILDSRMNTKYDENDKLIREVKVITLKSKLVSDFRKDFQFYKVREINNYHHAHDAYLNAVVGTALIKKYPKLESEFVYGDYKVYDVRKMIAKSEQEIGKATAKYFFYSNIMNFFKTEITLANGEIRKRPLIETNGETGEIVWDKGRDFATVRKVLSMPQVNIVKKTEVQTGGFSKESILPKRNSDKLIARKKDWDPKKYGGFVSPTVAYSVLVVAKVEKGKSKKLKSVKELLGITIMERSSFEKNPIDFLEAKGYKEVKKDLIIKLPKYSLFELENGRKRMLASARELQKGNELALPSKYVNFLYLASHYEKLKGSPEDNEQKQLFVEQHKHYLDEIIEQISEFSKRVILADANLDKVLSAYNKHRDKPIREQAENIIHLFTLTNLGAPAAFKYFDTTIDRKQYRSTKEVLDATLIHQSITGLYETRIDLSQLGGDEGADKRTADGSEFESPKKKRKV

SEQ ID NO: 347 - protein, 1588 aa, synthetic construct
  REGION 1..1588: note = 07. monoABE8.1_bpNLS + Q154R polypeptide sequence
MSEVEFSHEYWMRHALTLAKRARDEREVPVGAVLVLNNRVIGEGWNRAIGLHDPTAHAEIMALRQGGLVMQNYRLIDATLYVTFEPCVMCAGAMIHSRIGRVVFGVRNAKTGAAGSLMDVLHYPGMNHRVEITEGILADECAALLCYFFRMPRRVFNAQKKAQSSTDSGGSSGGSSGSETPGTSESATPESSGGSSGGSDKKYSIGLAIGTNSVGWAVITDEYKVPSKKFKVLGNTDRHSIKKNLIGALLFDSGETAEATRLKRTARRRYTRRKNRICYLQEIFSNEMAKVDDSFFHRLEESFLVEEDKKHERHPIFGNIVDEVAYHEKYPTIYHLRKKLVDSTDKADLRLIYLALAHMIKFRGHFLIEGDLNPDNSDVDKLFIQLVQTYNQLFEENPINASGVDAKAILSARLSKSRRLENLIAQLPGEKKNGLFGNLIALSLGLTPNFKSNFDLAEDAKLQLSKDTYDDDLDNLLAQIGDQYADLFLAAKNLSDAILLSDILRVNTEITKAPLSASMIKRYDEHHQDLTLLKALVRQQLPEKYKEIFFDQSKNGYAGYIDGGASQEEFYKFIKPILEKMDGTEELLVKLNREDLLRKQRTFDNGSIPHQIHLGELHAILRRQEDFYPFLKDNREKIEKILTFRIPYYVGPLARGNSRFAWMTRKSEETITPWNFEEVVDKGASAQSFIERMTNFDKNLPNEKVLPKHSLLYEYFTVYNELTKVKYVTEGMRKPAFLSGEQKKAIVDLLFKTNRKVTVKQLKEDYFKKIECFDSVEISGVEDRFNASLGTYHDLLKIIKDKDFLDNEENEDILEDIVLTLTLFEDREMIEERLKTYAHLFDDKVMKQLKRRRYTGWGRLSRKLINGIRDKQSGKTILDFLKSDGFANRNFMQLIHDDSLTFKEDIQKAQVSGQGDSLHEHIANLAGSPAIKKGILQTVKVVDELVKVMGRHKPENIVIEMARENQTTQKGQKNSRERMKRIEEGIKELGSQILKEHPVENTQLQNEKLYLYYLQNGRDMYVDQELDINRLSDYDVDHIVPQSFLKDDSIDNKVLTRSDKNRGKSDNVPSEEVVKKMKNYWRQLLNAKLITQRKFDNLTKAERGGLSELDKAGFIKRQLVETRQITKHVAQILDSRMNTKYDENDKLIREVKVITLKSKLVSDFRKDFQFYKVREINNYHHAHDAYLNAVVGTALIKKYPKLESEFVYGDYKVYDVRKMIAKSEQEIGKATAKYFFYSNIMNFFKTEITLANGEIRKRPLIETNGETGEIVWDKGRDFATVRKVLSMPQVNIVKKTEVQTGGFSKESILPKRNSDKLIARKKDWDPKKYGGFVSPTVAYSVLVVAKVEKGKSKKLKSVKELLGITIMERSSFEKNPIDFLEAKGYKEVKKDLIIKLPKYSLFELENGRKRMLASARELQKGNELALPSKYVNFLYLASHYEKLKGSPEDNEQKQLFVEQHKHYLDEIIEQISEFSKRVILADANLDKVLSAYNKHRDKPIREQAENIIHLFTLTNLGAPAAFKYFDTTIDRKQYRSTKEVLDATLIHQSITGLYETRIDLSQLGGDEGADKRTADGSEFESPKKKRKV

SEQ ID NO: 348 - protein, 1588 aa, synthetic construct
  REGION 1..1588: note = 08. monoABE8.1_bpNLS +Y147R_Q154R_Y123H polypeptide sequence
MSEVEFSHEYWMRHALTLAKRARDEREVPVGAVLVLNNRVIGEGWNRAIGLHDPTAHAEIMALRQGGLVMQNYRLIDATLYVTFEPCVMCAGAMIHSRIGRVVFGVRNAKTGAAGSLMDVLHHPGMNHRVEITEGILADECAALLCRFFRMPRRVFNAQKKAQSSTDSGGSSGGSSGSETPGTSESATPESSGGSSGGSDKKYSIGLAIGTNSVGWAVITDEYKVPSKKFKVLGNTDRHSIKKNLIGALLFDSGETAEATRLKRTARRRYTRRKNRICYLQEIFSNEMAKVDDSFFHRLEESFLVEEDKKHERHPIFGNIVDEVAYHEKYPTIYHLRKKLVDSTDKADLRLIYLALAHMIKFRGHFLIEGDLNPDNSDVDKLFIQLVQTYNQLFEENPINASGVDAKAILSARLSKSRRLENLIAQLPGEKKNGLFGNLIALSLGLTPNFKSNFDLAEDAKLQLSKDTYDDDLDNLLAQIGDQYADLFLAAKNLSDAILLSDILRVNTEITKAPLSASMIKRYDEHHQDLTLLKALVRQQLPEKYKEIFFDQSKNGYAGYIDGGASQEEFYKFIKPILEKMDGTEELLVKLNREDLLRKQRTFDNGSIPHQIHLGELHAILRRQEDFYPFLKDNREKIEKILTFRIPYYVGPLARGNSRFAWMTRKSEETITPWNFEEVVDKGASAQSFIERMTNFDKNLPNEKVLPKHSLLYEYFTVYNELTKVKYVTEGMRKPAFLSGEQKKAIVDLLFKTNRKVTVKQLKEDYFKKIECFDSVEISGVEDRFNASLGTYHDLLKIIKDKDFLDNEENEDILEDIVLTLTLFEDREMIEERLKTYAHLFDDKVMKQLKRRRYTGWGRLSRKLINGIRDKQSGKTILDFLKSDGFANRNFMQLIHDDSLTFKEDIQKAQVSGQGDSLHEHIANLAGSPAIKKGILQTVKVVDELVKVMGRHKPENIVIEMARENQTTQKGQKNSRERMKRIEEGIKELGSQILKEHPVENTQLQNEKLYLYYLQNGRDMYVDQELDINRLSDYDVDHIVPQSFLKDDSIDNKVLTRSDKNRGKSDNVPSEEVVKKMKNYWRQLLNAKLITQRKFDNLTKAERGGLSELDKAGFIKRQLVETRQITKHVAQILDSRMNTKYDENDKLIREVKVITLKSKLVSDFRKDFQFYKVREINNYHHAHDAYLNAVVGTALIKKYPKLESEFVYGDYKVYDVRKMIAKSEQEIGKATAKYFFYSNIMNFFKTEITLANGEIRKRPLIETNGETGEIVWDKGRDFATVRKVLSMPQVNIVKKTEVQTGGFSKESILPKRNSDKLIARKKDWDPKKYGGFVSPTVAYSVLVVAKVEKGKSKKLKSVKELLGITIMERSSFEKNPIDFLEAKGYKEVKKDLIIKLPKYSLFELENGRKRMLASARELQKGNELALPSKYVNFLYLASHYEKLKGSPEDNEQKQLFVEQHKHYLDEIIEQISEFSKRVILADANLDKVLSAYNKHRDKPIREQAENIIHLFTLTNLGAPAAFKYFDTTIDRKQYRSTKEVLDATLIHQSITGLYETRIDLSQLGGDEGADKRTADGSEFESPKKKRKV

SEQ ID NO: 349 - protein, 1588 aa, synthetic construct
  REGION 1..1588: note = 09. monoABE8.1_bpNLS +Y147R_Q154R_I76Y polypeptide sequence
MSEVEFSHEYWMRHALTLAKRARDEREVPVGAVLVLNNRVIGEGWNRAIGLHDPTAHAEIMALRQGGLVMQNYRLYDATLYVTFEPCVMCAGAMIHSRIGRVVFGVRNAKTGAAGSLMDVLHYPGMNHRVEITEGILADECAALLCRFFRMPRRVFNAQKKAQSSTDSGGSSGGSSGSETPGTSESATPESSGGSSGGSDKKYSIGLAIGTNSVGWAVITDEYKVPSKKFKVLGNTDRHSIKKNLIGALLFDSGETAEATRLKRTARRRYTRRKNRICYLQEIFSNEMAKVDDSFFHRLEESFLVEEDKKHERHPIFGNIVDEVAYHEKYPTIYHLRKKLVDSTDKADLRLIYLALAHMIKFRGHFLIEGDLNPDNSDVDKLFIQLVQTYNQLFEENPINASGVDAKAILSARLSKSRRLENLIAQLPGEKKNGLFGNLIALSLGLTPNFKSNFDLAEDAKLQLSKDTYDDDLDNLLAQIGDQYADLFLAAKNLSDAILLSDILRVNTEITKAPLSASMIKRYDEHHQDLTLLKALVRQQLPEKYKEIFFDQSKNGYAGYIDGGASQEEFYKFIKPILEKMDGTEELLVKLNREDLLRKQRTFDNGSIPHQIHLGELHAILRRQEDFYPFLKDNREKIEKILTFRIPYYVGPLARGNSRFAWMTRKSEETITPWNFEEVVDKGASAQSFIERMTNFDKNLPNEKVLPKHSLLYEYFTVYNELTKVKYVTEGMRKPAFLSGEQKKAIVDLLFKTNRKVTVKQLKEDYFKKIECFDSVEISGVEDRFNASLGTYHDLLKIIKDKDFLDNEENEDILEDIVLTLTLFEDREMIEERLKTYAHLFDDKVMKQLKRRRYTGWGRLSRKLINGIRDKQSGKTILDFLKSDGFANRNFMQLIHDDSLTFKEDIQKAQVSGQGDSLHEHIANLAGSPAIKKGILQTVKVVDELVKVMGRHKPENIVIEMARENQTTQKGQKNSRERMKRIEEGIKELGSQILKEHPVENTQLQNEKLYLYYLQNGRDMYVDQELDINRLSDYDVDHIVPQSFLKDDSIDNKVLTRSDKNRGKSDNVPSEEVVKKMKNYWRQLLNAKLITQRKFDNLTKAERGGLSELDKAGFIKRQLVETRQITKHVAQILDSRMNTKYDENDKLIREVKVITLKSKLVSDFRKDFQFYKVREINNYHHAHDAYLNAVVGTALIKKYPKLESEFVYGDYKVYDVRKMIAKSEQEIGKATAKYFFYSNIMNFFKTEITLANGEIRKRPLIETNGETGEIVWDKGRDFATVRKVLSMPQVNIVKKTEVQTGGFSKESILPKRNSDKLIARKKDWDPKKYGGFVSPTVAYSVLVVAKVEKGKSKKLKSVKELLGITIMERSSFEKNPIDFLEAKGYKEVKKDLIIKLPKYSLFELENGRKRMLASARELQKGNELALPSKYVNFLYLASHYEKLKGSPEDNEQKQLFVEQHKHYLDEIIEQISEFSKRVILADANLDKVLSAYNKHRDKPIREQAENIIHLFTLTNLGAPAAFKYFDTTIDRKQYRSTKEVLDATLIHQSITGLYETRIDLSQLGGDEGADKRTADGSEFESPKKKRKV

SEQ ID NO: 350 - protein, 1588 aa, synthetic construct
  REGION 1..1588: note = 10. monoABE8.1_bpNLS +Y147R_Q154R_T166R polypeptide sequence
MSEVEFSHEYWMRHALTLAKRARDEREVPVGAVLVLNNRVIGEGWNRAIGLHDPTAHAEIMALRQGGLVMQNYRLIDATLYVTFEPCVMCAGAMIHSRIGRVVFGVRNAKTGAAGSLMDVLHYPGMNHRVEITEGILADECAALLCRFFRMPRRVFNAQKKAQSSRDSGGSSGGSSGSETPGTSESATPESSGGSSGGSDKKYSIGLAIGTNSVGWAVITDEYKVPSKKFKVLGNTDRHSIKKNLIGALLFDSGETAEATRLKRTARRRYTRRKNRICYLQEIFSNEMAKVDDSFFHRLEESFLVEEDKKHERHPIFGNIVDEVAYHEKYPTIYHLRKKLVDSTDKADLRLIYLALAHMIKFRGHFLIEGDLNPDNSDVDKLFIQLVQTYNQLFEENPINASGVDAKAILSARLSKSRRLENLIAQLPGEKKNGLFGNLIALSLGLTPNFKSNFDLAEDAKLQLSKDTYDDDLDNLLAQIGDQYADLFLAAKNLSDAILLSDILRVNTEITKAPLSASMIKRYDEHHQDLTLLKALVRQQLPEKYKEIFFDQSKNGYAGYIDGGASQEEFYKFIKPILEKMDGTEELLVKLNREDLLRKQRTFDNGSIPHQIHLGELHAILRRQEDFYPFLKDNREKIEKILTFRIPYYVGPLARGNSRFAWMTRKSEETITPWNFEEVVDKGASAQSFIERMTNFDKNLPNEKVLPKHSLLYEYFTVYNELTKVKYVTEGMRKPAFLSGEQKKAIVDLLFKTNRKVTVKQLKEDYFKKIECFDSVEISGVEDRFNASLGTYHDLLKIIKDKDFLDNEENEDILEDIVLTLTLFEDREMIEERLKTYAHLFDDKVMKQLKRRRYTGWGRLSRKLINGIRDKQSGKTILDFLKSDGFANRNFMQLIHDDSLTFKEDIQKAQVSGQGDSLHEHIANLAGSPAIKKGILQTVKVVDELVKVMGRHKPENIVIEMARENQTTQKGQKNSRERMKRIEEGIKELGSQILKEHPVENTQLQNEKLYLYYLQNGRDMYVDQELDINRLSDYDVDHIVPQSFLKDDSIDNKVLTRSDKNRGKSDNVPSEEVVKKMKNYWRQLLNAKLITQRKFDNLTKAERGGLSELDKAGFIKRQLVETRQITKHVAQILDSRMNTKYDENDKLIREVKVITLKSKLVSDFRKDFQFYKVREINNYHHAHDAYLNAVVGTALIKKYPKLESEFVYGDYKVYDVRKMIAKSEQEIGKATAKYFFYSNIMNFFKTEITLANGEIRKRPLIETNGETGEIVWDKGRDFATVRKVLSMPQVNIVKKTEVQTGGFSKESILPKRNSDKLIARKKDWDPKKYGGFVSPTVAYSVLVVAKVEKGKSKKLKSVKELLGITIMERSSFEKNPIDFLEAKGYKEVKKDLIIKLPKYSLFELENGRKRMLASARELQKGNELALPSKYVNFLYLASHYEKLKGSPEDNEQKQLFVEQHKHYLDEIIEQISEFSKRVILADANLDKVLSAYNKHRDKPIREQAENIIHLFTLTNLGAPAAFKYFDTTIDRKQYRSTKEVLDATLIHQSITGLYETRIDLSQLGGDEGADKRTADGSEFESPKKKRKV

SEQ ID NO: 351 - protein, 1588 aa, synthetic construct
  REGION 1..1588: note = 11. monoABE8.1_bpNLS +Y147T_Q154R polypeptide sequence
MSEVEFSHEYWMRHALTLAKRARDEREVPVGAVLVLNNRVIGEGWNRAIGLHDPTAHAEIMALRQGGLVMQNYRLIDATLYVTFEPCVMCAGAMIHSRIGRVVFGVRNAKTGAAGSLMDVLHYPGMNHRVEITEGILADECAALLCTFFRMPRRVFNAQKKAQSSTDSGGSSGGSSGSETPGTSESATPESSGGSSGGSDKKYSIGLAIGTNSVGWAVITDEYKVPSKKFKVLGNTDRHSIKKNLIGALLFDSGETAEATRLKRTARRRYTRRKNRICYLQEIFSNEMAKVDDSFFHRLEESFLVEEDKKHERHPIFGNIVDEVAYHEKYPTIYHLRKKLVDSTDKADLRLIYLALAHMIKFRGHFLIEGDLNPDNSDVDKLFIQLVQTYNQLFEENPINASGVDAKAILSARLSKSRRLENLIAQLPGEKKNGLFGNLIALSLGLTPNFKSNFDLAEDAKLQLSKDTYDDDLDNLLAQIGDQYADLFLAAKNLSDAILLSDILRVNTEITKAPLSASMIKRYDEHHQDLTLLKALVRQQLPEKYKEIFFDQSKNGYAGYIDGGASQEEFYKFIKPILEKMDGTEELLVKLNREDLLRKQRTFDNGSIPHQIHLGELHAILRRQEDFYPFLKDNREKIEKILTFRIPYYVGPLARGNSRFAWMTRKSEETITPWNFEEVVDKGASAQSFIERMTNFDKNLPNEKVLPKHSLLYEYFTVYNELTKVKYVTEGMRKPAFLSGEQKKAIVDLLFKTNRKVTVKQLKEDYFKKIECFDSVEISGVEDRFNASLGTYHDLLKIIKDKDFLDNEENEDILEDIVLTLTLFEDREMIEERLKTYAHLFDDKVMKQLKRRRYTGWGRLSRKLINGIRDKQSGKTILDFLKSDGFANRNFMQLIHDDSLTFKEDIQKAQVSGQGDSLHEHIANLAGSPAIKKGILQTVKVVDELVKVMGRHKPENIVIEMARENQTTQKGQKNSRERMKRIEEGIKELGSQILKEHPVENTQLQNEKLYLYYLQNGRDMYVDQELDINRLSDYDVDHIVPQSFLKDDSIDNKVLTRSDKNRGKSDNVPSEEVVKKMKNYWRQLLNAKLITQRKFDNLTKAERGGLSELDKAGFIKRQLVETRQITKHVAQILDSRMNTKYDENDKLIREVKVITLKSKLVSDFRKDFQFYKVREINNYHHAHDAYLNAVVGTALIKKYPKLESEFVYGDYKVYDVRKMIAKSEQEIGKATAKYFFYSNIMNFFKTEITLANGEIRKRPLIETNGETGEIVWDKGRDFATVRKVLSMPQVNIVKKTEVQTGGFSKESILPKRNSDKLIARKKDWDPKKYGGFVSPTVAYSVLVVAKVEKGKSKKLKSVKELLGITIMERSSFEKNPIDFLEAKGYKEVKKDLIIKLPKYSLFELENGRKRMLASARELQKGNELALPSKYVNFLYLASHYEKLKGSPEDNEQKQLFVEQHKHYLDEIIEQISEFSKRVILADANLDKVLSAYNKHRDKPIREQAENIIHLFTLTNLGAPAAFKYFDTTIDRKQYRSTKEVLDATLIHQSITGLYETRIDLSQLGGDEGADKRTADGSEFESPKKKRKV

SEQ ID NO: 352 - protein, 1588 aa, synthetic construct
  REGION 1..1588: note = 12. monoABE8.1_bpNLS +Y147T_Q154S polypeptide sequence
MSEVEFSHEYWMRHALTLAKRARDEREVPVGAVLVLNNRVIGEGWNRAIGLHDPTAHAEIMALRQGGLVMQNYRLIDATLYVTFEPCVMCAGAMIHSRIGRVVFGVRNAKTGAAGSLMDVLHYPGMNHRVEITEGILADECAALLCTFFRMPRSVFNAQKKAQSSTDSGGSSGGSSGSETPGTSESATPESSGGSSGGSDKKYSIGLAIGTNSVGWAVITDEYKVPSKKFKVLGNTDRHSIKKNLIGALLFDSGETAEATRLKRTARRRYTRRKNRICYLQEIFSNEMAKVDDSFFHRLEESFLVEEDKKHERHPIFGNIVDEVAYHEKYPTIYHLRKKLVDSTDKADLRLIYLALAHMIKFRGHFLIEGDLNPDNSDVDKLFIQLVQTYNQLFEENPINASGVDAKAILSARLSKSRRLENLIAQLPGEKKNGLFGNLIALSLGLTPNFKSNFDLAEDAKLQLSKDTYDDDLDNLLAQIGDQYADLFLAAKNLSDAILLSDILRVNTEITKAPLSASMIKRYDEHHQDLTLLKALVRQQLPEKYKEIFFDQSKNGYAGYIDGGASQEEFYKFIKPILEKMDGTEELLVKLNREDLLRKQRTFDNGSIPHQIHLGELHAILRRQEDFYPFLKDNREKIEKILTFRIPYYVGPLARGNSRFAWMTRKSEETITPWNFEEVVDKGASAQSFIERMTNFDKNLPNEKVLPKHSLLYEYFTVYNELTKVKYVTEGMRKPAFLSGEQKKAIVDLLFKTNRKVTVKQLKEDYFKKIECFDSVEISGVEDRFNASLGTYHDLLKIIKDKDFLDNEENEDILEDIVLTLTLFEDREMIEERLKTYAHLFDDKVMKQLKRRRYTGWGRLSRKLINGIRDKQSGKTILDFLKSDGFANRNFMQLIHDDSLTFKEDIQKAQVSGQGDSLHEHIANLAGSPAIKKGILQTVKVVDELVKVMGRHKPENIVIEMARENQTTQKGQKNSRERMKRIEEGIKELGSQILKEHPVENTQLQNEKLYLYYLQNGRDMYVDQELDINRLSDYDVDHIVPQSFLKDDSIDNKVLTRSDKNRGKSDNVPSEEVVKKMKNYWRQLLNAKLITQRKFDNLTKAERGGLSELDKAGFIKRQLVETRQITKHVAQILDSRMNTKYDENDKLIREVKVITLKSKLVSDFRKDFQFYKVREINNYHHAHDAYLNAVVGTALIKKYPKLESEFVYGDYKVYDVRKMIAKSEQEIGKATAKYFFYSNIMNFFKTEITLANGEIRKRPLIETNGETGEIVWDKGRDFATVRKVLSMPQVNIVKKTEVQTGGFSKESILPKRNSDKLIARKKDWDPKKYGGFVSPTVAYSVLVVAKVEKGKSKKLKSVKELLGITIMERSSFEKNPIDFLEAKGYKEVKKDLIIKLPKYSLFELENGRKRMLASARELQKGNELALPSKYVNFLYLASHYEKLKGSPEDNEQKQLFVEQHKHYLDEIIEQISEFSKRVILADANLDKVLSAYNKHRDKPIREQAENIIHLFTLTNLGAPAAFKYFDTTIDRKQYRSTKEVLDATLIHQSITGLYETRIDLSQLGGDEGADKRTADGSEFESPKKKRKV

SEQ ID NO: 353 - protein, 1588 aa, synthetic construct
  REGION 1..1588: note = 13. monoABE8.1_bpNLS +H123Y123H_Y147R_Q154R_I76Y polypeptide sequence
MSEVEFSHEYWMRHALTLAKRARDEREVPVGAVLVLNNRVIGEGWNRAIGLHDPTAHAEIMALRQGGLVMQNYRLYDATLYVTFEPCVMCAGAMIHSRIGRVVFGVRNAKTGAAGSLMDVLHHPGMNHRVEITEGILADECAALLCRFFRMPRRVFNAQKKAQSSTDSGGSSGGSSGSETPGTSESATPESSGGSSGGSDKKYSIGLAIGTNSVGWAVITDEYKVPSKKFKVLGNTDRHSIKKNLIGALLFDSGETAEATRLKRTARRRYTRRKNRICYLQEIFSNEMAKVDDSFFHRLEESFLVEEDKKHERHPIFGNIVDEVAYHEKYPTIYHLRKKLVDSTDKADLRLIYLALAHMIKFRGHFLIEGDLNPDNSDVDKLFIQLVQTYNQLFEENPINASGVDAKAILSARLSKSRRLENLIAQLPGEKKNGLFGNLIALSLGLTPNFKSNFDLAEDAKLQLSKDTYDDDLDNLLAQIGDQYADLFLAAKNLSDAILLSDILRVNTEITKAPLSASMIKRYDEHHQDLTLLKALVRQQLPEKYKEIFFDQSKNGYAGYIDGGASQEEFYKFIKPILEKMDGTEELLVKLNREDLLRKQRTFDNGSIPHQIHLGELHAILRRQEDFYPFLKDNREKIEKILTFRIPYYVGPLARGNSRFAWMTRKSEETITPWNFEEVVDKGASAQSFIERMTNFDKNLPNEKVLPKHSLLYEYFTVYNELTKVKYVTEGMRKPAFLSGEQKKAIVDLLFKTNRKVTVKQLKEDYFKKIECFDSVEISGVEDRFNASLGTYHDLLKIIKDKDFLDNEENEDILEDIVLTLTLFEDREMIEERLKTYAHLFDDKVMKQLKRRRYTGWGRLSRKLINGIRDKQSGKTILDFLKSDGFANRNFMQLIHDDSLTFKEDIQKAQVSGQGDSLHEHIANLAGSPAIKKGILQTVKVVDELVKVMGRHKPENIVIEMARENQTTQKGQKNSRERMKRIEEGIKELGSQILKEHPVENTQLQNEKLYLYYLQNGRDMYVDQELDINRLSDYDVDHIVPQSFLKDDSIDNKVLTRSDKNRGKSDNVPSEEVVKKMKNYWRQLLNAKLITQRKFDNLTKAERGGLSELDKAGFIKRQLVETRQITKHVAQILDSRMNTKYDENDKLIREVKVITLKSKLVSDFRKDFQFYKVREINNYHHAHDAYLNAVVGTALIKKYPKLESEFVYGDYKVYDVRKMIAKSEQEIGKATAKYFFYSNIMNFFKTEITLANGEIRKRPLIETNGETGEIVWDKGRDFATVRKVLSMPQVNIVKKTEVQTGGFSKESILPKRNSDKLIARKKDWDPKKYGGFVSPTVAYSVLVVAKVEKGKSKKLKSVKELLGITIMERSSFEKNPIDFLEAKGYKEVKKDLIIKLPKYSLFELENGRKRMLASARELQKGNELALPSKYVNFLYLASHYEKLKGSPEDNEQKQLFVEQHKHYLDEIIEQISEFSKRVILADANLDKVLSAYNKHRDKPIREQAENIIHLFTLTNLGAPAAFKYFDTTIDRKQYRSTKEVLDATLIHQSITGLYETRIDLSQLGGDEGADKRTADGSEFESPKKKRKV

SEQ ID NO: 354 - protein, 1588 aa, synthetic construct
  REGION 1..1588: note = 14. monoABE8.1_bpNLS + V82S +Q154R polypeptide sequence
MSEVEFSHEYWMRHALTLAKRARDEREVPVGAVLVLNNRVIGEGWNRAIGLHDPTAHAEIMALRQGGLVMQNYRLIDATLYSTFEPCVMCAGAMIHSRIGRVVFGVRNAKTGAAGSLMDVLHYPGMNHRVEITEGILADECAALLCYFFRMPRRVFNAQKKAQSSTDSGGSSGGSSGSETPGTSESATPESSGGSSGGSDKKYSIGLAIGTNSVGWAVITDEYKVPSKKFKVLGNTDRHSIKKNLIGALLFDSGETAEATRLKRTARRRYTRRKNRICYLQEIFSNEMAKVDDSFFHRLEESFLVEEDKKHERHPIFGNIVDEVAYHEKYPTIYHLRKKLVDSTDKADLRLIYLALAHMIKFRGHFLIEGDLNPDNSDVDKLFIQLVQTYNQLFEENPINASGVDAKAILSARLSKSRRLENLIAQLPGEKKNGLFGNLIALSLGLTPNFKSNFDLAEDAKLQLSKDTYDDDLDNLLAQIGDQYADLFLAAKNLSDAILLSDILRVNTEITKAPLSASMIKRYDEHHQDLTLLKALVRQQLPEKYKEIFFDQSKNGYAGYIDGGASQEEFYKFIKPILEKMDGTEELLVKLNREDLLRKQRTFDNGSIPHQIHLGELHAILRRQEDFYPFLKDNREKIEKILTFRIPYYVGPLARGNSRFAWMTRKSEETITPWNFEEVVDKGASAQSFIERMTNFDKNLPNEKVLPKHSLLYEYFTVYNELTKVKYVTEGMRKPAFLSGEQKKAIVDLLFKTNRKVTVKQLKEDYFKKIECFDSVEISGVEDRFNASLGTYHDLLKIIKDKDFLDNEENEDILEDIVLTLTLFEDREMIEERLKTYAHLFDDKVMKQLKRRRYTGWGRLSRKLINGIRDKQSGKTILDFLKSDGFANRNFMQLIHDDSLTFKEDIQKAQVSGQGDSLHEHIANLAGSPAIKKGILQTVKVVDELVKVMGRHKPENIVIEMARENQTTQKGQKNSRERMKRIEEGIKELGSQILKEHPVENTQLQNEKLYLYYLQNGRDMYVDQELDINRLSDYDVDHIVPQSFLKDDSIDNKVLTRSDKNRGKSDNVPSEEVVKKMKNYWRQLLNAKLITQRKFDNLTKAERGGLSELDKAGFIKRQLVETRQITKHVAQILDSRMNTKYDENDKLIREVKVITLKSKLVSDFRKDFQFYKVREINNYHHAHDAYLNAVVGTALIKKYPKLESEFVYGDYKVYDVRKMIAKSEQEIGKATAKYFFYSNIMNFFKTEITLANGEIRKRPLIETNGETGEIVWDKGRDFATVRKVLSMPQVNIVKKTEVQTGGFSKESILPKRNSDKLIARKKDWDPKKYGGFVSPTVAYSVLVVAKVEKGKSKKLKSVKELLGITIMERSSFEKNPIDFLEAKGYKEVKKDLIIKLPKYSLFELENGRKRMLASARELQKGNELALPSKYVNFLYLASHYEKLKGSPEDNEQKQLFVEQHKHYLDEIIEQISEFSKRVILADANLDKVLSAYNKHRDKPIREQAENIIHLFTLTNLGAPAAFKYFDTTIDRKQYRSTKEVLDATLIHQSITGLYETRIDLSQLGGDEGADKRTADGSEFESPKKKRKV

SEQ ID NO: 355 - protein, 4 aa, synthetic construct
  REGION 1..4: note = synthetic peptide sequence
SGGS

SEQ ID NO: 356 - protein, 24 aa, synthetic construct
  REGION 1..24: note = synthetic peptide sequence
SGGSSGSETPGTSESATPESSGGS

SEQ ID NO: 357 - protein, 32 aa, synthetic construct
  REGION 1..32: note = synthetic polypeptide sequence
SGGSSGGSSGSETPGTSESATPESSGGSSGGS

SEQ ID NO: 358 - protein, 104 aa, synthetic construct
  REGION 1..104: note = synthetic polypeptide sequence
GGSGGSPGSPAGSPTSTEEGTSESATPESGPGTSTEPSEGSAPGSPAGSPTSTEEGTSTEPSEGSAPGTSTEPSEGSAPGTSESATPESGPGSEPATSGGSGGS

SEQ ID NO: 359 - protein, 24 aa, synthetic construct
  REGION 1..24: note = synthetic peptide sequence
SGGSSGGSSGSETPGTSESATPES

SEQ ID NO: 360 - protein, 40 aa, synthetic construct
  REGION 1..40: note = synthetic polypeptide sequence
SGGSSGGSSGSETPGTSESATPESSGGSSGGSSGGSSGGS

SEQ ID NO: 361 - protein, 64 aa, synthetic construct
  REGION 1..64: note = synthetic polypeptide sequence
SGGSSGGSSGSETPGTSESATPESSGGSSGGSSGGSSGGSSGSETPGTSESATPESSGGSSGGS

SEQ ID NO: 362 - protein, 92 aa, synthetic construct
  REGION 1..92: note = synthetic polypeptide sequence
PGSPAGSPTSTEEGTSESATPESGPGTSTEPSEGSAPGSPAGSPTSTEEGTSTEPSEGSAPGTSTEPSEGSAPGTSESATPESGPGSEPATS

SEQ ID NO: 363 - protein, 5 aa, synthetic construct
  REGION 1..5: note = synthetic peptide sequence
PAPAP

SEQ ID NO: 364 - protein, 6 aa, synthetic construct
  REGION 1..6: note = synthetic peptide sequence
PAPAPA

SEQ ID NO: 365 - protein, 7 aa, synthetic construct
  REGION 1..7: note = synthetic peptide sequence
PAPAPAP

SEQ ID NO: 366 - protein, 8 aa, synthetic construct
  REGION 1..8: note = synthetic peptide sequence
PAPAPAPA

SEQ ID NO: 367 - protein, 9 aa, synthetic construct
  REGION 1..9: note = synthetic peptide sequence
PAPAPAPAP

SEQ ID NO: 368 - protein, 15 aa, synthetic construct
  REGION 1..15: note = synthetic peptide sequence
PAPAPAPAPAPAPAP

SEQ ID NO: 369 - protein, 21 aa, synthetic construct
  REGION 1..21: note = synthetic peptide sequence
PAPAPAPAPAPAPAPAPAPAP

SEQ ID NO: 370 - DNA, 306 bp, synthetic construct
  misc_feature 1..306: note = DnaE Intein-N polynucleotide sequence
  source 1..306: mol_type = other DNA
tgcctgtcatacgaaaccgagatactgacagtagaatatggccttctgccaatcgggaagattgtggagaaacggatagaatgcacagtttactctgtcgataacaatggtaacatttatactcagccagttgcccagtggcacgaccggggagagcaggaagtattcgaatactgtctggaggatggaagtctcattagggccactaaggaccacaaatttatgacagtcgatggccagatgctgcctatagacgaaatctttgagcgagagttggacctcatgcgagttgacaaccttcctaat

SEQ ID NO: 371 - protein, 102 aa, synthetic construct
  REGION 1..102: note = DnaE Intein-N polypeptide sequence
CLSYETEILTVEYGLLPIGKIVEKRIECTVYSVDNNGNIYTQPVAQWHDRGEQEVFEYCLEDGSLIRATKDHKFMTVDGQMLPIDEIFERELDLMRVDNLPN

SEQ ID NO: 372 - DNA, 108 bp, synthetic construct
  misc_feature 1..108: note = DnaE Intein-C polynucleotide sequence
  source 1..108: mol_type = other DNA
atgatcaagatagctacaaggaagtatcttggcaaacaaaacgtttatgatattggagtcgaaagagatcacaactttgctctgaagaacggattcatagcttctaat

SEQ ID NO: 373 - protein, 36 aa, synthetic construct
  REGION 1..36: note = DnaE Intein-C polypeptide sequence
MIKIATRKYLGKQNVYDIGVERDHNFALKNGFIASN

SEQ ID NO: 374 - DNA, 303 bp, synthetic construct
  misc_feature 1..303: note = Cfa-N polynucleotide sequence
  source 1..303: mol_type = other DNA
tgcctgtcttatgataccgagatacttaccgttgaatatggcttcttgcctattggaaagattgtcgaagagagaattgaatgcacagtatatactgtagacaagaatggtttcgtttacacacagcccattgctcaatggcacaatcgcggcgaacaagaagtatttgagtactgtctcgaggatggaagcatcatacgagcaactaaagatcataaattcatgaccactgacgggcagatgttgccaatagatgagatattcgagcggggcttggatctcaaacaagtggatggattgcca

SEQ ID NO: 375 - protein, 101 aa, synthetic construct
  REGION 1..101: note = Cfa-N polypeptide sequence
CLSYDTEILTVEYGFLPIGKIVEERIECTVYTVDKNGFVYTQPIAQWHNRGEQEVFEYCLEDGSIIRATKDHKFMTTDGQMLPIDEIFERGLDLKQVDGLP

SEQ ID NO: 376 - DNA, 159 bp, synthetic construct
  misc_feature 1..159: note = Cfa-C polynucleotide sequence
  source 1..159: mol_type = other DNA
atgaagaggactgccgatggatcagagtttgaatctcccaagaagaagaggaaagtaaagataatatctcgaaaaagtcttggtacccaaaatgtctatgatattggagtggagaaagatcacaacttccttctcaagaacggtctcgtagccagcaac

SEQ ID NO: 377 - protein, 53 aa, synthetic construct
  REGION 1..53: note = Cfa-C polypeptide sequence
MKRTADGSEFESPKKKRKVKIISRKSLGTQNVYDIGVEKDHNFLLKNGLVASN

SEQ ID NO: 378 - protein, 1081 aa, Neisseria meningitidis
  REGION 1..1081: note = MISC_FEATURE - Nme3Cas9; WP_002217928.1 type II CRISPR RNA-guided endonuclease Cas9 [Neisseria meningitidis]
  REGION 1..1081: note = MISC_FEATURE - NCBI Reference: WP_002217928.1; type II CRISPR RNA-guided endonuclease Cas9; Nme3Cas9 polypeptide sequence
MAAFKPNPINYILGLDIGIASVGWAMVEIDEEENPIRLIDLGVRVFERAEVPKTGDSLAMARRLARSVRRLTRRRAHRLLRARRLLKREGVLQAADFDENGLIKSLPNTPWQLRAAALDRKLTPLEWSAVLLHLIKHRGYLSQRKNEGETADKELGALLKGVADNAHALQTGDFRTPAELALNKFEKECGHIRNQRGDYSHTFSRKDLQAELNLLFEKQKEFGNPHVSGGLKEGIETLLMTQRPALSGDAVQKMLGHCTFEPAEPKAAKNTYTAERFIWLTKLNNLRILEQGSERPLTDTERATLMDEPYRKSKLTYAQARKLLSLEDTAFFKGLRYGKDNAEASTLMEMKAYHTISRALEKEGLKDKKSPLNLSPELQDEIGTAFSLFKTDEDITGRLKDRIQPEILEALLKHISFDKFVQISLKALRRIVPLMEQGKRYDEACAEIYGDHYGKKNTEEKIYLPPIPADEIRNPVVLRALSQARKVINGVVRRYGSPARIHIETAREVGKSFKDRKEIEKRQEENRKDREKAAAKFREYFPNFVGEPKSKDILKLRLYEQQHGKCLYSGKEINLGRLNEKGYVEIDHALPFSRTWDDSFNNKVLVLGSENQNKGNQTPYEYFNGKDNSREWQEFKARVETSRFPRSKKQRILLQKFDEDGFKERNLNDTRYVNRFLCQFVADRMRLTGKGKKRVFASNGQITNLLRGFWGLRKVRAENDRHHALDAVVVACSTVAMQQKITRFVRYKEMNAFDGKTIDKETGEVLHQKTHFPQPWEFFAQEVMIRVFGKPDGKPEFEEADTPEKLRTLLAEKLSSRPEAVHEYVTPLFVSRAPNRKMSGQGHMETVKSAKRLDEGVSVLRVPLTQLKLKDLEKMVNREREPKLYEALKARLEAHKDDPAKAFAEPFYKYDKAGNRTQQVKAVRVEQVQKTGVWVRNHNGIADNATMVRVDVFEKGDKYYLVPIYSWQVAKGILPDRAVVAYADEEDWTVIDESFRFKFVLYSNDLIKVQLKKDSFLGYFSGLDRATGAISLREHDLEKSKGKDGMHRIGVKTALSFQKYQIDEMGKEIRPCRLKKRPPVR

SEQ ID NO: 379 - RNA, 66 nt, synthetic construct
  misc_feature 1..66: note = Telomerase Ku Binding Motif oligonucleotide sequence
  source 1..66: mol_type = other RNA
ttcttgtcgtacttatagatcgctacgttatttcaattttgaaaatctgagtcctgggagtgcgga

SEQ ID NO: 380 - protein, 1094 aa, synthetic construct
  REGION 1..1094: note = Telomerase Ku Heterodimer polypeptide sequence
MSGWESYYKTEGDEEAEEEQEENLEASGDYKYSGRDSLIFLVDASKAMFESQSEDELTPFDMSIQCIQSVYISKIISSDRDLLAVVFYGTEKDKNSVNFKNIYVLQELDNPGAKRILELDQFKGQQGQKRFQDMMGHGSDYSLSEVLWVCANLFSDVQFKMSHKRIMLFTNEDNPHGNDSAKASRARTKAGDLRDTGIFLDLMHLKKPGGFDISLFYRDIISIAEDEDLRVHFEESSKLEDLLRKVRAKETRKRALSRLKLKLNKDIVISVGIYNLVQKALKPPPIKLYRETNEPVKTKTRTFNTSTGGLLLPSDTKRSQIYGSRQIILEKEETEELKRFDDPGLMLMGFKPLVLLKKHHYLRPSLFVYPEESLVIGSSTLFSALLIKCLEKEVAALCRYTPRRNIPPYFVALVPQEEELDDQKIQVTPPGFQLVFLPFADDKRKMPFTEKIMATPEQVGKMKAIVEKLRFTYRSDSFENPVLQQHFRNLEALALDLMEPEQAVDLTLPKVEAMNKRLGSLVDEFKELVYPPDYNPEGKVTKRKHDNEGSGSKRPKVEYSEEELKTHISKGTLGKFTVPMLKEACRAYGLKSGLKKQELLEALTKHFQDMVRSGNKAAVVLCMDVGFTMSNSIPGIESPFEQAKKVITMFVQRQVFAENKDEIALVLFGTDGTDNPLSGGDQYQNITVHRHLMLPDFDLLEDIESKIQPGSQQADFLDALIVSMDVIQHETIGKKFEKRHIEIFTDLSSRFSKSQLDIIIHSLKKCDISERHSIHWPCRLTIGSNLSIRIAAYKSILQERVKKTWTVVDAKTLKKEDIQKETVYCLNDDDETEVLKEDIIQGFRYGSDIVPFSKVDEEQMKYKSEGKCFSVLGFCKSSQVQRRFFMGNQVLKVFAARDDEAAAVALSSLIHALDDLDMVAIVRYAYDKRANPQVGVAFPHIKHNYECLVYVQLPFMEDLRQYMFSSLKNSKKYAPTEAQLNAVDALIDSMSLAKKDEKTDTLEDLFPTTKIPNPRFQRLFQCLLHRALHPREPLPPIQQHIWNMLNPPAEVTTKSQIPLSKIKTLFPLIEAKKKDQVTAQEIFQDNHEDGPTAK

SEQ ID NO: 381 - RNA, 10 nt, synthetic construct
  misc_feature 1..10: note = Telomerase Sm7 consensus site(single stranded) oligonucleotide sequence
  source 1..10: mol_type = other RNA
aatttttgga

SEQ ID NO: 382 - protein, 83 aa, synthetic construct
  REGION 1..83: note = MS2 coat protein polypeptide sequence
GSVIDVSSQRVNVQRPLDALGNSLNSPVIIKLKGDREFRGVLKSFDLHMNLVLNDAEELEDGEVTRRLGTVLIRGDNIVYISP

SEQ ID NO: 383 - RNA, 26 nt, synthetic construct
  misc_feature 1..26: note = PP7 phage operator stem loop oligonucleotide sequence
  source 1..26: mol_type = other RNA
ataaggagtttatatggaaaccctta

SEQ ID NO: 384 - protein, 128 aa, synthetic construct
  REGION 1..128: note = PP7 coat protein (PCP)polypeptide sequence
MSKTIVLSVGEATRTLTEIQSTADRQIFEEKVGPLVGRLRLTASLRQNGAKTAYRVNLKLDQADVVDCSTSVCGELPKVRYTQVWSHDVTIVANSTEASRKSLYDLTKSLVATSQVEDLVVNLVPLGR

SEQ ID NO: 385 - RNA, 19 nt, synthetic construct
  misc_feature 1..19: note = SfMu Com stem loop oligonucleotide sequence
  source 1..19: mol_type = other RNA
ctgaatgcctgcgagcatc

SEQ ID NO: 386 - protein, 62 aa, synthetic construct
  REGION 1..62: note = SfMu Com binding protein polypeptide sequence
MKSIRCKNCNKLLFKADSFDHIEIRCPRCKRHIIMLNACEHPTEKHCGKREKITHSDETVRY

SEQ ID NO: 387 - protein, 47 aa, synthetic construct
  REGION 1..47: note = leucine zipper polypeptide sequence
LEIRAAFLRQRNTALRTEVAELEQEVQRLENEVSQYETRYGPLGGGK

SEQ ID NO: 388 - protein, 47 aa, synthetic construct
  REGION 1..47: note = leucine zipper polypeptide sequence
LEIEAAFLERENTALETRVAELRQRVQRLRNRVSQYRTRYGPLGGGK

SEQ ID NO: 389 - DNA, 303 bp, synthetic construct
  source 1..303: mol_type = other DNA
tgcctgagctacgataccgagatcctgaccgtggaatacggcttcctgcctatcggcaagatcgtcgaggaacggatcgagtgcacagtgtacaccgtggataagaatggcttcgtgtacacccagcctatcgctcagtggcacaacagaggcgagcaagaggtgttcgagtactgcctggaagatggcagcatcatccgggccaccaaggaccacaagtttatgaccaccgacggccagatgctgcccatcgacgagatctttgagagaggcctggacctgaaacaggtggacggactgcct

SEQ ID NO: 390 - protein, 101 aa, synthetic construct; identical to SEQ ID NO: 375

SEQ ID NO: 391 - DNA, 264 bp, synthetic construct
  source 1..264: mol_type = other DNA
tgtctggacctcaagacccaagtgcagacacctcagggcatgaaagagattagcaatatccaggtgggcgacctggtcctgagcaacaccggctacaacgaggtgctgaacgtgttccctaagtccaagaagaaatcttataagatcaccctggaagatggcaaggaaatcatctgcagcgaggaacacctgttccccacccagaccggcgagatgaacatcagcggcggactgaaggagggcatgtgcctgtacgtgaaggag

SEQ ID NO: 392 - protein, 88 aa, synthetic construct
CLDLKTQVQTPQGMKEISNIQVGDLVLSNTGYNEVLNVFPKSKKKSYKITLEDGKEIICSEEHLFPTQTGEMNISGGLKEGMCLYVKE

SEQ ID NO: 393 - DNA, 267 bp, synthetic construct
  source 1..267: mol_type = other DNA
tgcctgagcctggacaccatggtggtgacaaacggcaaggccatcgagatcagagatgtgaaggtgggagattggctggaaagcgaatgtggcccagtgcaggttacagaggtgctgcctatcatcaagcagcctgtctttgagattgtgctgaaaagcggaaaaaagatccgggtgtccgctaatcacaagttccccaccaaggacggcctcaagaccatcaacagcggcctgaaggtgggcgacttcctgagaagcagagccaag

SEQ ID NO: 394 - protein, 89 aa, synthetic construct
CLSLDTMVVTNGKAIEIRDVKVGDWLESECGPVQVTEVLPIIKQPVFEIVLKSGKKIRVSANHKFPTKDGLKTINSGLKVGDFLRSRAK

SEQ ID NO: 395 - DNA, 303 bp, synthetic construct
  source 1..303: mol_type = other DNA
tgttttgtgcctggcaccctggtgaacacagagaatggcctgaagaaaatcgaggaaatcaaggtgggcgacaaggtgttcagccatacaggcaagctgcaggaggtggtggacaccctgatcttcgaccgggacgaggaaatcatctctatcaacggcattgattgcaccaagaaccacgagttctacgtgatcgataaggaaaacgctaatagagtgaacgaggacaacatccacctcttcgccagatgggtccacgccgaggaactggatatgaaaaagcacctgctgatcgagctggaa

SEQ ID NO: 396 - protein, 101 aa, synthetic construct
CFVPGTLVNTENGLKKIEEIKVGDKVFSHTGKLQEVVDTLIFDRDEEIISINGIDCTKNHEFYVIDKENANRVNEDNIHLFARWVHAEELDMKKHLLIELE

SEQ ID NO: 397 - DNA, 315 bp, synthetic construct
  source 1..315: mol_type = other DNA
tgcctggtgggctctagcgagattatcacaagaaactacggcaagaccaccatcaaggaagtggtcgagatcttcgacaacgacaagaatatccaggtgctggccttcaacacccacaccgataatatcgagtgggcccctatcaaggccgctcagctgaccagacctaacgccgagctggttgaactggaaatcgacaccctgcacggcgtgaaaacaatccggtgcacccctgaccaccccgtgtacaccaagaacagaggctacgtgcgggccgacgagctgacagatgatgacgagctcgtggtggctatc

SEQ ID NO: 398 - protein, 105 aa, synthetic construct
CLVGSSEIITRNYGKTTIKEVVEIFDNDKNIQVLAFNTHTDNIEWAPIKAAQLTRPNAELVELEIDTLHGVKTIRCTPDHPVYTKNRGYVRADELTDDDELVVAI

SEQ ID NO: 399 - DNA, 306 bp, synthetic construct
  source 1..306: mol_type = other DNA
tgcctgagctacgagacagagatcctgaccgtggaatatggcctgctgccaatcggaaagatcgtggaaaagcggatcgagtgcaccgtctacagcgtggacaacaacggaaatatctatacacagcctgtggcccaatggcacgaccggggcgaacaggaggtgtttgagtactgcctggaagatggttctctgattagagccaccaaggaccacaagttcatgaccgtcgacggccagatgctgcccatcgacgaaatcttcgagcgggaactcgacctgatgagagtggataacctgcccaat

SEQ ID NO: 400 - protein, 102 aa, synthetic construct; identical to SEQ ID NO: 371

SEQ ID NO: 401 - protein, 101 aa, synthetic construct; identical to SEQ ID NO: 375

SEQ ID NO: 402 - protein, 102 aa, synthetic construct; identical to SEQ ID NO: 371

SEQ ID NO: 403 - DNA, 279 bp, synthetic construct
  source 1..279: mol_type = other DNA
acaagaagcggatactgtctggacctcaagacccaagtgcagacacctcagggcatgaaagagattagcaatatccaggtgggcgacctggtcctgagcaacaccggctacaacgaggtgctgaacgtgttccctaagtccaagaagaaatcttataagatcaccctggaagatggcaaggaaatcatctgcagcgaggaacacctgttccccacccagaccggcgagatgaacatcagcggcggactgaaggagggcatgtgcctgtacgtgaaggag

SEQ ID NO: 404 - protein, 93 aa, synthetic construct
TRSGYCLDLKTQVQTPQGMKEISNIQVGDLVLSNTGYNEVLNVFPKSKKKSYKITLEDGKEIICSEEHLFPTQTGEMNISGGLKEGMCLYVKE

SEQ ID NO: 405 - DNA, 282 bp, synthetic construct
  source 1..282: mol_type = other DNA
tctcagctgaaccggtgcctgagcctggacaccatggtggtgacaaacggcaaggccatcgagatcagagatgtgaaggtgggagattggctggaaagcgaatgtggcccagtgcaggttacagaggtgctgcctatcatcaagcagcctgtctttgagattgtgctgaaaagcggaaaaaagatccgggtgtccgctaatcacaagttccccaccaaggacggcctcaagaccatcaacagcggcctgaaggtgggcgacttcctgagaagcagagccaag

SEQ ID NO: 406 - protein, 94 aa, synthetic construct
SQLNRCLSLDTMVVTNGKAIEIRDVKVGDWLESECGPVQVTEVLPIIKQPVFEIVLKSGKKIRVSANHKFPTKDGLKTINSGLKVGDFLRSRAK

SEQ ID NO: 407 - DNA, 318 bp, synthetic construct
  source 1..318: mol_type = other DNA
ggcatcggcggaggatgttttgtgcctggcaccctggtgaacacagagaatggcctgaagaaaatcgaggaaatcaaggtgggcgacaaggtgttcagccatacaggcaagctgcaggaggtggtggacaccctgatcttcgaccgggacgaggaaatcatctctatcaacggcattgattgcaccaagaaccacgagttctacgtgatcgataaggaaaacgctaatagagtgaacgaggacaacatccacctcttcgccagatgggtccacgccgaggaactggatatgaaaaagcacctgctgatcgagctggaa

SEQ ID NO: 408 - protein, 106 aa, synthetic construct
GIGGGCFVPGTLVNTENGLKKIEEIKVGDKVFSHTGKLQEVVDTLIFDRDEEIISINGIDCTKNHEFYVIDKENANRVNEDNIHLFARWVHAEELDMKKHLLIELE

SEQ ID NO: 409 - DNA, 330 bp, synthetic construct
  source 1..330: mol_type = other DNA
ggaacaaacccatgttgcctggtgggctctagcgagattatcacaagaaactacggcaagaccaccatcaaggaagtggtcgagatcttcgacaacgacaagaatatccaggtgctggccttcaacacccacaccgataatatcgagtgggcccctatcaaggccgctcagctgaccagacctaacgccgagctggttgaactggaaatcgacaccctgcacggcgtgaaaacaatccggtgcacccctgaccaccccgtgtacaccaagaacagaggctacgtgcgggccgacgagctgacagatgatgacgagctcgtggtggctatc

SEQ ID NO: 410 - protein, 110 aa, synthetic construct
GTNPCCLVGSSEIITRNYGKTTIKEVVEIFDNDKNIQVLAFNTHTDNIEWAPIKAAQLTRPNAELVELEIDTLHGVKTIRCTPDHPVYTKNRGYVRADELTDDDELVVAI

SEQ ID NO: 411 - DNA, 105 bp, synthetic construct
  source 1..105: mol_type = other DNA
gtcaagatcatcagcagaaagagcctgggcacccagaacgtgtacgatatcggagtgggcgagccccacaactttctgctcaagaatggcctggtggccagcaac

SEQ ID NO: 412 - protein, 35 aa, synthetic construct
VKIISRKSLGTQNVYDIGVGEPHNFLLKNGLVASN

SEQ ID NO: 413 - DNA, 114 bp, synthetic construct
  source 1..114: mol_type = other DNA
atgatgctgaaaaagatcctgaagatcgaggaactggatgagagagagctgatcgacatcgaagtgtctggcaatcacctgttctacgccaacgacatcctgacccacaacagc

SEQ ID NO: 414 - protein, 38 aa, synthetic construct
MMLKKILKIEELDERELIDIEVSGNHLFYANDILTHNS

SEQ ID NO: 415 - DNA, 138 bp, synthetic construct
  source 1..138: mol_type = other DNA
atgtgcgaaatcttcgagaacgagattgattgggacgaaatcgcctctatcgagtacgtgggcgtggaagagacaatcgacatcaacgtgaccaacgacagactgtttttcgccaatggcatcctgacccacaacagc

SEQ ID NO: 416 - protein, 46 aa, synthetic construct
MCEIFENEIDWDEIASIEYVGVEETIDINVTNDRLFFANGILTHNS

SEQ ID NO: 417 - DNA, 123 bp, synthetic construct
  source 1..123: mol_type = other DNA
atgaaattcaagctgaaggaaatcaccagcatcgagacaaagcactacaagggcaaggtgcacgatctgaccgtgaaccaggaccacagctacaacgtcagaggcaccgtggtgcataattct

SEQ ID NO: 418 - protein, 41 aa, synthetic construct
MKFKLKEITSIETKHYKGKVHDLTVNQDHSYNVRGTVVHNS

SEQ ID NO: 419 - DNA, 123 bp, synthetic construct
  source 1..123: mol_type = other DNA
atggaagccaagacctacatcggcaagctgaaatctagaaagatcgtgtccaacgaggatacatacgacatccagaccagcacccacaatttcttcgccaacgacatcctggtgcacaacagc

SEQ ID NO: 420 - protein, 41 aa, synthetic construct
MEAKTYIGKLKSRKIVSNEDTYDIQTSTHNFFANDILVHNS

SEQ ID NO: 421 - DNA, 108 bp, synthetic construct
  source 1..108: mol_type = other DNA
atgatcaagatcgccacaagaaagtacctgggcaagcagaacgtgtacgacatcggcgtggagagagaccacaacttcgccctgaagaacggctttatcgcctctaat

SEQ ID NO: 422 - protein, 36 aa, synthetic construct; identical to SEQ ID NO: 373

SEQ ID NO: 423 - protein, 36 aa, synthetic construct
MVKIISRKSLGTQNVYDIGVGEPHNFLLKNGLVASN

SEQ ID NO: 424 - protein, 35 aa, synthetic construct
IKIATRKYLGKQNVYDIGVERDHNFALKNGFIASN

SEQ ID NO: 425 - DNA, 88 bp, synthetic construct
  source 1..88: mol_type = other DNA; note = SaCas9 scaffold sequence
gttttagtactctgtaatgaaaattacagaatctactaaaacaaggcaaaatgccgtgtttatctcgtcaacttgttggcgagatttt

SEQ ID NO: 426 - protein, 764 aa, Homo sapiens
MGSNLSPQLCLMPFILGLLSGGVTTTPWSLAQPQGSCSLEGVEIKGGSFRLLQEGQALEYVCPSGFYPYPVQTRTCRSTGSWSTLKTQDQKTVRKAECRAIHCPRPHDFENGEYWPRSPYYNVSDEISFHCYDGYTLRGSANRTCQVNGRWSGQTAICDNGAGYCSNPGIPIGTRKVGSQYRLEDSVTYHCSRGLTLRGSQRRTCQEGGSWSGTEPSCQDSFMYDTPQEVAEAFLSSLTETIEGVDAEDGHGPGEQQKRKIVLDPSGSMNIYLVLDGSDSIGASNFTGAKKCLVNLIEKVASYGVKPRYGLVTYATYPKIWVKVSEADSSNADWVTKQLNEINYEDHKLKSGTNTKKALQAVYSMMSWPDDVPPEGWNRTRHVIILMTDGLHNMGGDPITVIDEIRDLLYIGKDRKNPREDYLDVYVFGVGPLVNQVNINALASKKDNEQHVFKVKDMENLEDVFYQMIDESQSLSLCGMVWEHRKGTDYHKQPWQAKISVIRPSKGHESCMGAVVSEYFVLTAAHCFTVDDKEHSIKVSVGGEKRDLEIEVVLFHPNYNINGKKEAGIPEFYDYDVALIKLKNKLKYGQTIRPICLPCTEGTTRALRLPPTTTCQQQKEELLPAQDIKALFVSEEEKKLTRKEVYIKNGDKKGSCERDAQYAPGYDKVKDISEVVTPRFLCTGGVSPYADPNTCRGDSGGPLIVHKRSRFIQVGVISWGVVDVCKNQKRQKQVPAHARDFHINLFQVLPWLKEKLQDEDLGFL

SEQ ID NO: 427 - RNA, 2295 nt, Homo sapiens
  source 1..2295: mol_type = genomic RNA
atggggagcaatctcagcccccaactctgcctgatgccctttatcttgggcctcttgtctggaggtgtgaccaccactccatggtctttggcccagccccagggatcctgctctctggagggggtagagatcaaaggcggctccttccgacttctccaagagggccaggcactggagtacgtgtgtccttctggcttctacccgtaccctgtgcagacacgtacctgcagatctacggggtcctggagcaccctgaagactcaagaccaaaagactgtcaggaaggcagagtgcagagcaatccactgtccaagaccacacgacttcgagaacggggaatactggccccggtctccctactacaatgtgagtgatgagatctctttccactgctatgacggttacactctccggggctctgccaatcgcacctgccaagtgaatggccggtggagtgggcagacagcgatctgtgacaacggagcggggtactgctccaacccgggcatccccattggcacaaggaaggtgggcagccagtaccgccttgaagacagcgtcacctaccactgcagccgggggcttaccctgcgtggctcccagcggcgaacgtgtcaggaaggtggctcttggagcgggacggagccttcctgccaagactccttcatgtacgacacccctcaagaggtggccgaagctttcctgtcttccctgacagagaccatagaaggagtcgatgctgaggatgggcacggcccaggggaacaacagaagcggaagatcgtcctggacccttcaggctccatgaacatctacctggtgctagatggatcagacagcattggggccagcaacttcacaggagccaaaaagtgtctagtcaacttaattgagaaggtggcaagttatggtgtgaagccaagatatggtctagtgacatatgccacataccccaaaatttgggtcaaagtgtctgaagcagacagcagtaatgcagactgggtcacgaagcagctcaatgaaatcaattatgaagaccacaagttgaagtcagggactaacaccaagaaggccctccaggcagtgtacagcatgatgagctggccagatgacgtccctcctgaaggctggaaccgcacccgccatgtcatcatcctcatgactgatggattgcacaacatgggcggggacccaattactgtcattgatgagatccgggacttgctatacattggcaaggatcgcaaaaacccaagggaggattatctggatgtctatgtgtttggggtcgggcctttggtgaaccaagtgaacatcaatgctttggcttccaagaaagacaatgagcaacatgtgttcaaagtcaaggatatggaaaacctggaagatgttttctaccaaatgatcgatgaaagccagtctctgagtctctgtggcatggtttgggaacacaggaagggtaccgattaccacaagcaaccatggcaggccaagatctcagtcattcgcccttcaaagggacacgagagctgtatgggggctgtggtgtctgagtactttgtgctgacagcagcacattgtttcactgtggatgacaaggaacactcaatcaaggtcagcgtaggaggggagaagcgggacctggagatagaagtagtcctatttcaccccaactacaacattaatgggaaaaaagaagcaggaattcctgaattttatgactatgacgttgccctgatcaagctcaagaataagctgaaatatggccagactatcaggcccatttgtctcccctgcaccgagggaacaactcgagctttgaggcttcctccaactaccacttgccagcaacaaaaggaagagctgctccctgcacaggatatcaaagctctgtttgtgtctgaggaggagaaaaagctgactcggaaggaggtctacatcaagaatggggataagaaaggcagctgtgagagagatgctcaatatgccccaggctatgacaaagtcaaggacatctcagaggtggtcacccctcggttcctttgtactggaggagtgagtccctatgctgaccccaatacttgcagaggtgattctggcggccccttgatagttcacaagagaagtcgtttcattcaagttggtgtaatcagctggggagtagtggatgtctgcaaaaaccagaagcggcaaaagcaggtacctgctcacgcccgagactttcacatcaacctctttcaagtgctgccctggctgaaggagaaactccaagatgaggatttgggttttctataa

SEQ ID NO: 428 - DNA, 7637 bp, Homo sapiens
  source 1..7637: mol_type = genomic DNA
aggacccaggggttacaggatctcagccttgttggggggatgagggaggcctttgagggatctagggaggttggggcttacagttggggctgtggcagcctcccagccagttctctccttttctccaggtgggtctggtgagctggggtctttacaacccctgccttggctctgctgacaaaaactcccgcaaaagggcccctcgtagcaaggtcccgccgccacgagactttcacatcaatctcttccgcatgcagccctggctgaggcagcacctgggggatgtcctgaattttttacccctctagccatggccactgagccctctgctgccctgccagaatctgccgcccctccatcttctacctctgaatggccacccttagaccctgtgatccatcctctctcctagctgagtaaatccgggtctctaggatgccagaggcagcgcacacaagctgggaaatcctcagggctcctaccagcaggactgcctcgctgccccacctcccgctccttggcctgtccccagattccttccctggttgacttgactcatgcttgtttcactttcacatggaatttcccagttatgaaattaataaaaatcaatggtttccacatctctcagtgcctctatctggaggccaggtagggctggccttgggggagggggaggccagaatgactccaagagctacaggaaggcaggtcagagaccccactggacaaacagtggctggactctgcaccataacacacaatcaacaggggagtgagctggatccttatttctggtccctaagtgggtggtttgggcttactggggaggagctaaggccggagaggaggtactgaaggggagagtcctggacctttggcagcaaagggtgggacttctgcagtttctgtttccttgactggcagctcagcggggccctcccgcttggatgttccgggaaagtgatgtgggtaggacaggcggggcgagccgcaggtgccagaacacagattgtataaaaggctgggggctggtggggagcaggggaagggaatgtgaccaggtctaggtctggagtttcagcttggacactgagccaagcagacaagcaaagcaagccaggacacaccatcctgccccaggcccagcttctctcctgccttccaacgccatggggagcaatctcagcccccaactctgcctgatgccctttatcttgggcctcttgtctggaggtaagcgagggtaaccttcccttcctgctgtctccagcatccctccttggccttttggggccaggcttcatcagcctttctcttcaggtgtgaccaccactccatggtctttggcccggccccagggatcctgctctctggagggggtagagatcaaaggcggctccttccgacttctccaagagggccaggcactggagtacgtgtgtccttctggcttctacccgtaccctgtgcagacacgtacctgcagatctacggggtcctggagcaccctgaagactcaagaccaaaagactgtcaggaaggcagagtgcagaggtttgagggcaatgagtgtgggcagtggcctaaggcagaaacagggcaggcggcagcaaggtcaggactaggatgagactaggcagggtgacaaggtgggctgaccgggagtaggagcagttttagggtggcaggcggaaagggggcaagaaaaagcggagttaacccttactaagcatttaccctgggcttccaggcagccctggaagtcaagagaacactcagaaatggggagggagaagcagtggaaatccatatgggttgaggagtaggtaagatgctgcttctgcgggactgggaatgcgctgtttctcagtgacatggtctccgagaccaggagggatacacctaaggcagcctttccctcttgatgacttctacttgtccccccttctcaaagcaatccactgtccaagaccacacgacttcgagaacggggaatactggccccggtctccctactacaatgtgagtgatgagatctctttccactgctatgacggttacactctccggggctctgccaatcgcacctgccaagtgaatggccgatggagtgggcagacagcgatctgtgacaacggaggtgagaagcatcccctccccctacattgctgtctccctgacggcgcccagcccgaggagtgggcactcggctccggacactgtaactcttgctctctaccttgctcacggggcctcaggcttcagtgcttacctcgatgtctcatacctctgcagcggggtactgctccaacccgggcatccccattggcacaaggaaggtgggcagccagtaccgccttgaagacagcgtcacctaccactgcagccgggggcttaccctgcgtggctcccagcggcgaacgtgtcaggaaggtggctcttggagcgggacggagccttcctgccaaggtgacctttgacctgtacccccaggtcagatcctggtcttccatcctactgtcttctctccccacctcaaccctgctctttcctcactttgtttaaacctccctgtacaactatctcacttctgagccttttataccctggaaacccatgatcccccgtctctttggtcactgtatccctgacactcccagacatttgacctcatttctgactctcccagactccttcatgtacgacacccctcaagaggtggccgaagctttcctgtcttccctgacagagaccatagaaggagtcgatgctgaggatgggcacggcccaggtttgaagacagagaagggaggcagggcagggaactgggggaaaatggagaagggacagaactgttaatgctggagcctgagccactctcctggcacccaggggaacaacagaagcggaagatcgtcctggacccttcaggctccatgaacatctacctggtgctagatggatcagacagcattggggccagcaacttcacaggagccaaaaagtgtctagtcaacttaattgagaaggtggaatcctcctatccctgaactcgggggaatggaatctcgctgatcttccaggactagctccctgatcattccagcccctctgaacaacagggccccaggaaaatctccaggtcctattctgtcctccttcccttttacttgaagcagtttcttgactggtaattcctccatgaacctcagcccttgagcctcttactgagagcctccctgtcccagcaaagtcgctgaaatctcccaatcacagtattctattttcaatgccatggcgccttgttctcctcacccacaggtggcaagttatggtgtgaagccaagatatggtctagtgacatatgccacataccccaaaatttgggtcaaagtgtctgaagcagacagcagtaatgcagactgggtcacgaagcagctcaatgaaatcaattatgaaggtcagaggttagggaatggtgggaggttcactttggggtcaggaggttcagggtggagggggtcatgagactaccttgagggcgacagggaggaccactttgtagtcaaaagttgaacagcaggatcgttgggcaatggaggttagtgggaacctgttgggggctggaagggccactttgtggtcaaagggaagtccgtgtaatgatgattaacttaaaaagttgaaagatgtgggatttcagttgcagattggtctctggggttaaaagatggcttggaagaccaggtgaggtgatggtctcttccctctccacagaccacaagttgaagtcagggactaacaccaagaaggccctccaggcagtgtacagcatgatgagctggccagatgacgtccctcctgaaggctggaaccgcacccgccatgtcatcatcctcatgactgatggtcagaagggacctctctcctgtcccagcctccccaccttctcagaccagcatgtggcccttaagtccacttgtaacactatacccatggttggggccctgaatgtgactcatagctggctgttcatctctcctgtgacccttcataaggaattcttcctaagccctgtgatcaactatctctaacccttcctcaacttgctcaccctgccatgtgtatccctgcctttagccagtttatcttccttatctcctaccctcatggtcctgtctcttctgcaggattgcacaacatgggcggggacccaattactgtcattgatgagatccgggacttgctatacattggcaaggatcgcaaaaacccaagggaggattatctgggtgagtaacctgcctaggacccagcaccccacttcctcagggcttggaccctcatccttcctttttatccctcagatgtctatgtgtttggggtcgggcctttggtgaaccaagtgaacatcaatgctttggcttccaagaaagacaatgagcaacatgtgttcaaagtcaaggatatggaaaacctggaagatgttttctaccaaatgatcggtagggagatacaagggaataaagaacacaactctcctcaggttcccctgaagtaattcattcttcctctacacctgaagctctagttgcctggaaagccttcttcattcctccttctctacctcagtgtcactattcttgtttcctggcactgttcacttaaccttagaatcacagagctctgagcacttcagagatctttctatagtcctacatttgacacgtggaaacagaagccaaaggaggtcaagggacagcaagttagcaacaagggtgggcttgaaaacagccaggcctctgacagcttgatcccaagttctttcccttttcagtccaccatagcagttttctcctaacacgaggaaacaaatacccgtggtctttccctttctccttttgggcctttgctccccatagactcctacccaaaaggctgctgccatttgggaatgaagtgttccgagttttcagcacattctccttctctgccagatgaaagccagtctctgagtctctgtggcatggtttgggaacacaggaagggtaccgattaccacaagcaaccatggcaggccaagatctcagtcattgtaagcacagaatcccagtagtggggacttgggggaggtgaggtcaaggtgaaatgggagtaggggaaggaaaaaatggccataagagatggtggtttgtgaaagttgagctttccctctctactgttgtgtccccagcgcccttcaaagggacacgagagctgtatgggggctgtggtgtctgagtactttgtgctgacagcagcacattgtttcactgtggatgacaaggaacactcaatcaaggtcagcgtaggtaaggatgcaactgaaggtcctgggctgcacctatgctctccaggcaacacctcccactttctacagatcctacactccacccatcctcaatgcagccccattccttgcaccccagaccagtcagggatgggggaagacgtgaagttaggaatgacacggggccagaggcaggaagctgcccacaaagaggtggtacctactctcctacttcaggaggggagaagcgggacctggagatagaagtagtcctatttcaccccaactacaacattaatgggaaaaaagaagcaggaattcctgaattttatgactatgacgttgccctgatcaagctcaagaataagctgaaatatggccagactatcaggtgagagcgtccagatccctgaggaaaggctgggaaaggctggaggactggggtgaggagcaggcctggtttgctgttctccttgtcctttataggcccatttgtctcccctgcaccgagggaacaactcgagctttgaggcttcctccaactaccacttgccagcaacaaagtaagacatacttggcaagaggataaggatgagatcccaagagacaagtggggcatgagagggaggtgcaataggaagagatgatgcctggcccagaacctagctctagaagggcttaggggacatctactgagtgacaaaggcaatggggagatgacagtggtgggagcagctgaagtgacgcagtctattcgtccagaggaagagctgctccctgcacaggatatcaaagctctgtttgtgtctgaggaggagaaaaagctgactcggaaggaggtctacatcaagaatggggataaggtgagaaacgggcatcctaaggaggcactctaggccccaatccttcctaagccacttctgttcattacttctccatgcttcccacctcccctacagaaaggcagctgtgagagagatgctcaatatgccccaggctatgacaaagtcaaggacatctcagaggtggtcacccctcggttcctttgtactggaggagtgagtccctatgctgaccccaatacttgcagaggtgagagaatgctctttggttgtgctacaagtgcccaaggcccaacagtccttttctctacagcttctcctctccttgcaggtgattctggcggccccttgatagttcacaagagaagtcgtttcattcaagtgagtcctccctttcctatctggggagatgccaagtggtcagcatgggccccaaagcaggaaagctcaatgcatgtggctagtaattcgaggtaggcagagcctgcctcaccttaggaccgcatgtcttgcctgcgtgtgtcaagaacgaggctgagctgggtccctagtctgattcctttaggtcagctaagacacaagcaggaacagccatgcttccaggattaggaattctactgaatgatccatggcaccccactgcctctgcaggttggtgtaatcagctggggagtagtggatgtctgcaaaaaccagaagcggcaaaagcaggtacctgctcacgcccgagactttcacatcaacctctttcaagtgctgccctggctgaaggagaaactccaagatgaggatttgggttttctataaggggtttcctgctggacaggggcgtgggattgaattaaaacagctgcgacaacacctgtgttccagatccttttggggcaagggagtggggaacaggcactggccatgttgttacactgagatcaaacctgacagccgtttttaaaggtttaaccccaatcccaagtgctgaaaaaccagaggctgagggagatgtgtaagcttccacctcagtgttttactgagaccagcattggggcatatgaggcacaaggaatccagctctgttccctagaagccatccacaaggttttccttgtagacgtcatcactgtagacaatctgggtcctcttgtcccggtggcaacccttagggctgttctggacagctagggagggaggagaggaacagttaaggtctaaaggagatcatagaacagaccctgaggctgactcctgaccacctcactcctggccactggcccctggaagcccagtttccacgctgccctctggtggccaggatggcctgtcttccttagctcctttgtgccaacccatggccaagaaaagtataagtggacattttgatgaatgttttgttcttagaaaaatcccaaatgtcattgttgagacacgtgaatgatattaacccactacttacagtcagtatgtca

SEQ ID NO: 429 - DNA, 23 bp, Homo sapiens
  source 1..23: mol_type = genomic DNA
gcttacaatgactgagatcttgg

SEQ ID NO: 430 - DNA, 23 bp, Macaca fascicularis
  source 1..23: mol_type = genomic DNA
gcttacagtgactgagatcttgg

SEQ ID NO: 431 - DNA, 116 bp, Homo sapiens
  source 1..116: mol_type = genomic DNA
catggcaggccaagatctcagtcattgtaagcacagaatcccatatggaaggtcattagctccggcaagcaatcatggcaggccaagatctcagtcactgtaagcacagaatccca

SEQ ID NO: 432 - protein, 9 aa, Homo sapiens
HGRPRSQSL

SEQ ID NO: 433 - protein, 28 aa, Homo sapiens
AQNPIWKVISSGKQSWQAKISVTVSTES

SEQ ID NO: 434 - DNA, 23 bp, Homo sapiens
  source 1..23: mol_type = genomic DNA
tgctccccatggcgttggaaggc

SEQ ID NO: 435 - DNA, 23 bp, Macaca fascicularis
  source 1..23: mol_type = genomic DNA
tgctccccatggcattagaaggc

SEQ ID NO: 436 - DNA, 23 bp, Homo sapiens
  source 1..23: mol_type = genomic DNA
ttgctccccatggcgttggaagg

SEQ ID NO: 437 - DNA, 23 bp, Macaca fascicularis
  source 1..23: mol_type = genomic DNA
ctgctccccatggcattagaagg

SEQ ID NO: 438 - DNA, 23 bp, Homo sapiens
  source 1..23: mol_type = genomic DNA
ccccatggcgttggaaggcagga

SEQ ID NO: 439 - DNA, 23 bp, Macaca fascicularis
  source 1..23: mol_type = genomic DNA
ccccatggcattagaaggcagga

SEQ ID NO: 440 - RNA, 100 nt, synthetic construct
  source 1..100: mol_type = other RNA
nnnnnnnnnnnnnnnnnnnngttttagagctagaaatagcaagttaaaataaggctagtccgttatcaacttgaaaaagtggcaccgagtcggtgctttt

SEQ ID NO: 441 - RNA, 109 nt, synthetic construct
  source 1..109: mol_type = other RNA
nnnnnnnnnnnnnnnnnnnnngttttagtactctgtaatgaaaattacagaatctactaaaacaaggcaaaatgccgtgtttatctcgtcaacttgttggcgagatttt

SEQ ID NO: 442 - skipped

SEQ ID NO: 443 - protein, 19 aa, synthetic construct
CKRTADGSEFESPKKKRKV

SEQ ID NO: 444 - RNA, 106 nt, synthetic construct
  source 1..106: mol_type = other RNA
nnnnnnnnnnnnnnnnnnnngttttagagccggcggaaacgccggcaagttaaaataaggctagtccgttatcaacttgaaaaagtggcaccgagtcggtgctttt

SEQ ID NO: 445 - RNA, 106 nt, synthetic construct; identical to SEQ ID NO: 444
  source 1..106: mol_type = other RNA

SEQ ID NO: 446 - protein, 19 aa, synthetic construct
CKRTADGSEFESPKKKRKV

SEQ ID NO: 447 - RNA, 114 nt, synthetic construct
  source 1..114: mol_type = other RNA
nnnnnnnnnnnnnnnnnnnngttttagagccggcggaaacgccggcaagttaaaataaggctagtccgttatcaacttggacttcggtccaagtggcaccgagtcggtgctttt

SEQ ID NO: 448 - RNA, 99 nt, synthetic construct
  source 1..99: mol_type = other RNA
ctcagatgtctatgtgtttgttttagagctagaaatagcaagttaaaataaggctagtccgttatcaacttgaaaaagtggcaccgagtcggtgctttt

SEQ ID NO: 449 - RNA, 100 nt, synthetic construct
  source 1..100: mol_type = other RNA
cctcagatgtctatgtgtttgttttagagctagaaatagcaagttaaaataaggctagtccgttatcaacttgaaaaagtggcaccgagtcggtgctttt

SEQ ID NO: 450 - RNA, 101 nt, synthetic construct
  source 1..101: mol_type = other RNA
ccctcagatgtctatgtgtttgttttagagctagaaatagcaagttaaaataaggctagtccgttatcaacttgaaaaagtggcaccgagtcggtgctttt

SEQ ID NO: 451 - RNA, 102 nt, synthetic construct
  source 1..102: mol_type = other RNA
tccctcagatgtctatgtgtttgttttagagctagaaatagcaagttaaaataaggctagtccgttatcaacttgaaaaagtggcaccgagtcggtgctttt

SEQ ID NO: 452 - RNA, 103 nt, synthetic construct
  source 1..103: mol_type = other RNA
atccctcagatgtctatgtgtttgttttagagctagaaatagcaagttaaaataaggctagtccgttatcaacttgaaaaagtggcaccgagtcggtgctttt

SEQ ID NO: 453 - RNA, 99 nt, synthetic construct
  source 1..99: mol_type = other RNA
ctcacctctgcaagtattggttttagagctagaaatagcaagttaaaataaggctagtccgttatcaacttgaaaaagtggcaccgagtcggtgctttt

SEQ ID NO: 454 - RNA, 100 nt, synthetic construct
  source 1..100: mol_type = other RNA
tctcacctctgcaagtattggttttagagctagaaatagcaagttaaaataaggctagtccgttatcaacttgaaaaagtggcaccgagtcggtgctttt

SEQ ID NO: 455 - RNA, 101 nt, synthetic construct
  source 1..101: mol_type = other RNA
ctctcacctctgcaagtattggttttagagctagaaatagcaagttaaaataaggctagtccgttatcaacttgaaaaagtggcaccgagtcggtgctttt

SEQ ID NO: 456 - RNA, 102 nt, synthetic construct
  source 1..102: mol_type = other RNA
tctctcacctctgcaagtattggttttagagctagaaatagcaagttaaaataaggctagtccgttatcaacttgaaaaagtggcaccgagtcggtgctttt

SEQ ID NO: 457 - RNA, 103 nt, synthetic construct
  source 1..103: mol_type = other RNA
ttctctcacctctgcaagtattggttttagagctagaaatagcaagttaaaataaggctagtccgttatcaacttgaaaaagtggcaccgagtcggtgctttt

SEQ ID NO: 458 - RNA, 99 nt, synthetic construct
  source 1..99: mol_type = other RNA
cttacaatgactgagatctgttttagagctagaaatagcaagttaaaataaggctagtccgttatcaacttgaaaaagtggcaccgagtcggtgctttt

SEQ ID NO: 459 - RNA, 100 nt, synthetic construct
  source 1..100: mol_type = other RNA
gcttacaatgactgagatctgttttagagctagaaatagcaagttaaaataaggctagtccgttatcaacttgaaaaagtggcaccgagtcggtgctttt

SEQ ID NO: 460 - RNA, 101 nt, synthetic construct
  source 1..101: mol_type = other RNA
tgcttacaatgactgagatctgttttagagctagaaatagcaagttaaaataaggctagtccgttatcaacttgaaaaagtggcaccgagtcggtgctttt

SEQ ID NO: 461 - RNA, 102 nt, synthetic construct
  source 1..102: mol_type = other RNA
gtgcttacaatgactgagatctgttttagagctagaaatagcaagttaaaataaggctagtccgttatcaacttgaaaaagtggcaccgagtcggtgctttt

SEQ ID NO: 462 - RNA, 103 nt, synthetic construct
  source 1..103: mol_type = other RNA
tgtgcttacaatgactgagatctgttttagagctagaaatagcaagttaaaataaggctagtccgttatcaacttgaaaaagtggcaccgagtcggtgctttt

SEQ ID NO: 463 - RNA, 99 nt, synthetic construct
  source 1..99: mol_type = other RNA
cttacagtgactgagatctgttttagagctagaaatagcaagttaaaataaggctagtccgttatcaacttgaaaaagtggcaccgagtcggtgctttt

SEQ ID NO: 464 - RNA, 100 nt, synthetic construct
  source 1..100: mol_type = other RNA
gcttacagtgactgagatctgttttagagctagaaatagcaagttaaaataaggctagtccgttatcaacttgaaaaagtggcaccgagtcggtgctttt

SEQ ID NO: 465 - RNA, 101 nt, synthetic construct
  source 1..101: mol_type = other RNA
tgcttacagtgactgagatctgttttagagctagaaatagcaagttaaaataaggctagtccgttatcaacttgaaaaagtggcaccgagtcggtgctttt

SEQ ID NO: 466 - RNA, 102 nt, synthetic construct
  source 1..102: mol_type = other RNA
gtgcttacagtgactgagatctgttttagagctagaaatagcaagttaaaataaggctagtccgttatcaacttgaaaaagtggcaccgagtcggtgctttt

SEQ ID NO: 467 - RNA, 103 nt, synthetic construct
  source 1..103: mol_type = other RNA
tgtgcttacagtgactgagatctgttttagagctagaaatagcaagttaaaataaggctagtccgttatcaacttgaaaaagtggcaccgagtcggtgctttt

SEQ ID NO: 468 - RNA, 100 nt, synthetic construct
  source 1..100: mol_type = other RNA
cagaatcacctgcaaggagagttttagagctagaaatagcaagttaaaataaggctagtccgttatcaacttgaaaaagtggcaccgagtcggtgctttt

SEQ ID NO: 469 - RNA, 100 nt, synthetic construct
  source 1..100: mol_type = other RNA
ccagaatcacctgcaaggaggttttagagctagaaatagcaagttaaaataaggctagtccgttatcaacttgaaaaagtggcaccgagtcggtgctttt

SEQ ID NO: 470 - RNA, 109 nt, synthetic construct
  source 1..109: mol_type = other RNA
gcccaccttccttgtgccaatgttttagtactctgtaatgaaaattacagaatctactaaaacaaggcaaaatgccgtgtttatctcgtcaacttgttggcgagatttt

SEQ ID NO: 471 - RNA, 109 nt, synthetic construct
  source 1..109: mol_type = other RNA
ctggctgcccaccttccttgtgttttagtactctgtaatgaaaattacagaatctactaaaacaaggcaaaatgccgtgtttatctcgtcaacttgttggcgagatttt

SEQ ID NO: 472 - RNA, 109 nt, synthetic construct
  source 1..109: mol_type = other RNA
tgctgtctgatccatctagcagttttagtactctgtaatgaaaattacagaatctactaaaacaaggcaaaatgccgtgtttatctcgtcaacttgttggcgagatttt

SEQ ID NO: 473 - RNA, 109 nt, synthetic construct
  source 1..109: mol_type = other RNA
acagcagcacattgtttcactgttttagtactctgtaatgaaaattacagaatctactaaaacaaggcaaaatgccgtgtttatctcgtcaacttgttggcgagatttt

SEQ ID NO: 474 - RNA, 100 nt, synthetic construct
  source 1..100: mol_type = other RNA
gcagcacattgtttcactgtgttttagagctagaaatagcaagttaaaataaggctagtccgttatcaacttgaaaaagtggcaccgagtcggtgctttt

SEQ ID NO: 475 - RNA, 100 nt, synthetic construct
  source 1..100: mol_type = other RNA
gcacattgtttcactgtggagttttagagctagaaatagcaagttaaaataaggctagtccgttatcaacttgaaaaagtggcaccgagtcggtgctttt

SEQ ID NO: 476 - RNA, 100 nt, synthetic construct
  source 1..100: mol_type = other RNA
acgttcgccgctgggagccagttttagagctagaaatagcaagttaaaataaggctagtccgttatcaacttgaaaaagtggcaccgagtcggtgctttt

SEQ ID NO: 477 - RNA, 100 nt, synthetic construct
  source 1..100: mol_type = other RNA
caatgctgtctgatccatctgttttagagctagaaatagcaagttaaaataaggctagtccgttatcaacttgaaaaagtggcaccgagtcggtgctttt

SEQ ID NO: 478 - RNA, 100 nt, synthetic construct
  source 1..100: mol_type = other RNA
gatggatcagacagcattgggttttagagctagaaatagcaagttaaaataaggctagtccgttatcaacttgaaaaagtggcaccgagtcggtgctttt

SEQ ID NO: 479 - RNA, 100 nt, synthetic construct
  source 1..100: mol_type = other RNA
gatcagacagcattggggccgttttagagctagaaatagcaagttaaaataaggctagtccgttatcaacttgaaaaagtggcaccgagtcggtgctttt

SEQ ID NO: 480 - RNA, 100 nt, synthetic construct
  source 1..100: mol_type = other RNA
tcagggactaacaccaagaagttttagagctagaaatagcaagttaaaataaggctagtccgttatcaacttgaaaaagtggcaccgagtcggtgctttt

SEQ ID NO: 481 - RNA, 100 nt, synthetic construct
  source 1..100: mol_type = other RNA
ccaccttccttgtgccaatggttttagagctagaaatagcaagttaaaataaggctagtccgttatcaacttgaaaaagtggcaccgagtcggtgctttt

SEQ ID NO: 482 - RNA, 100 nt, synthetic construct
  source 1..100: mol_type = other RNA
cccaccttccttgtgccaatgttttagagctagaaatagcaagttaaaataaggctagtccgttatcaacttgaaaaagtggcaccgagtcggtgctttt

SEQ ID NO: 483 - RNA, 100 nt, synthetic construct
  source 1..100: mol_type = other RNA
gcccaccttccttgtgccaagttttagagctagaaatagcaagttaaaataaggctagtccgttatcaacttgaaaaagtggcaccgagtcggtgctttt

SEQ ID NO: 484 - RNA, 100 nt, synthetic construct
  source 1..100: mol_type = other RNA
gtcagggactaacaccaagagttttagagctagaaatagcaagttaaaataaggctagtccgttatcaacttgaaaaagtggcaccgagtcggtgctttt

SEQ ID NO: 485 - RNA, 100 nt, synthetic construct
  source 1..100: mol_type = other RNA
agcagcacattgtttcactggttttagagctagaaatagcaagttaaaataaggctagtccgttatcaacttgaaaaagtggcaccgagtcggtgctttt

SEQ ID NO: 486 - RNA, 109 nt, synthetic construct; identical to SEQ ID NO: 470
  source 1..109: mol_type = other RNA

SEQ ID NO: 487 - RNA, 109 nt, synthetic construct; identical to SEQ ID NO: 473
  source 1..109: mol_type = other RNA

SEQ ID NO: 488 - RNA, 109 nt, synthetic construct; identical to SEQ ID NO: 470
  source 1..109: mol_type = other RNA

SEQ ID NO: 489 - RNA, 109 nt, synthetic construct; identical to SEQ ID NO: 471
  source 1..109: mol_type = other RNA

SEQ ID NO: 490 - RNA, 109 nt, synthetic construct
  source 1..109: mol_type = other RNA
cgttcgccgctgggagccacggttttagtactctgtaatgaaaattacagaatctactaaaacaaggcaaaatgccgtgtttatctcgtcaacttgttggcgagatttt

SEQ ID NO: 491 - RNA, 109 nt, synthetic construct
  source 1..109: mol_type = other RNA
tcttccgcttctgttgttcccgttttagtactctgtaatgaaaattacagaatctactaaaacaaggcaaaatgccgtgtttatctcgtcaacttgttggcgagatttt

SEQ ID NO: 492 - RNA, 109 nt, synthetic construct; identical to SEQ ID NO: 472
  source 1..109: mol_type = other RNA

SEQ ID NO: 493 - RNA, 109 nt, synthetic construct
  source 1..109: mol_type = other RNA
aacgtcatagtcataaaattcgttttagtactctgtaatgaaaattacagaatctactaaaacaaggcaaaatgccgtgtttatctcgtcaacttgttggcgagatttt

SEQ ID NO: 494 - RNA, 109 nt, synthetic construct; identical to SEQ ID NO: 473
  source 1..109: mol_type = other RNA

SEQ ID NO: 495 - RNA, 109 nt, synthetic construct
  source 1..109: mol_type = other RNA
tgcaggtgattctggcggcccgttttagtactctgtaatgaaaattacagaatctactaaaacaaggcaaaatgccgtgtttatctcgtcaacttgttggcgagatttt

SEQ ID NO: 496 - RNA, 100 nt, synthetic construct
  source 1..100: mol_type = other RNA
cccaggggaacaacagaagcgttttagagctagaaatagcaagttaaaataaggctagtccgttatcaacttgaaaaagtggcaccgagtcggtgctttt

SEQ ID NO: 497 - RNA, 100 nt, synthetic construct
  source 1..100: mol_type = other RNA
aggggaacaacagaagcggagttttagagctagaaatagcaagttaaaataaggctagtccgttatcaacttgaaaaagtggcaccgagtcggtgctttt

SEQ ID NO: 498 - RNA, 100 nt, synthetic construct
  source 1..100: mol_type = other RNA
cagaagcggaagatcgtcctgttttagagctagaaatagcaagttaaaataaggctagtccgttatcaacttgaaaaagtggcaccgagtcggtgctttt

SEQ ID NO: 499 - RNA, 100 nt, synthetic construct
  source 1..100: mol_type = other RNA
gccagatgaaagccagtctcgttttagagctagaaatagcaagttaaaataaggctagtccgttatcaacttgaaaaagtggcaccgagtcggtgctttt

SEQ ID NO: 500 - RNA, 100 nt, synthetic construct
  source 1..100: mol_type = other RNA
acagaagcggaagatcgtccgttttagagctagaaatagcaagttaaaataaggctagtccgttatcaacttgaaaaagtggcaccgagtcggtgctttt

SEQ ID NO: 501 - RNA, 100 nt, synthetic construct
  source 1..100: mol_type = other RNA
agatggatcagacagcattggttttagagctagaaatagcaagttaaaataaggctagtccgttatcaacttgaaaaagtggcaccgagtcggtgctttt

SEQ ID NO: 502 - RNA, 109 nt, synthetic construct
  source 1..109: mol_type = other RNA
ctgccagatgaaagccagtctgttttagtactctgtaatgaaaattacagaatctactaaaacaaggcaaaatgccgtgtttatctcgtcaacttgttggcgagatttt

SEQ ID NO: 503 - RNA, 109 nt, synthetic construct
  source 1..109: mol_type = other RNA
cccaggggaacaacagaagcggttttagtactctgtaatgaaaattacagaatctactaaaacaaggcaaaatgccgtgtttatctcgtcaacttgttggcgagatttt

SEQ ID NO: 504 - RNA, 109 nt, synthetic construct; identical to SEQ ID NO: 502
  source 1..109: mol_type = other RNA

SEQ ID NO: 505 - RNA, 100 nt, synthetic construct
  source 1..100: mol_type = other RNA
ttgttcccctgggtgccagggttttagagctagaaatagcaagttaaaataaggctagtccgttatcaacttgaaaaagtggcaccgagtcggtgctttt

SEQ ID NO: 506 - RNA, 100 nt, synthetic construct
  source 1..100: mol_type = other RNA
tgatccatctagcaccaggtgttttagagctagaaatagcaagttaaaataaggctagtccgttatcaacttgaaaaagtggcaccgagtcggtgctttt

SEQ ID NO: 507 - RNA, 100 nt, synthetic construct
  source 1..100: mol_type = other RNA
accatcagtcatgaggatgagttttagagctagaaatagcaagttaaaataaggctagtccgttatcaacttgaaaaagtggcaccgagtcggtgctttt

SEQ ID NO: 508 - RNA, 100 nt, synthetic construct
  source 1..100: mol_type = other RNA
ctgaccatcagtcatgaggagttttagagctagaaatagcaagttaaaataaggctagtccgttatcaacttgaaaaagtggcaccgagtcggtgctttt

SEQ ID NO: 509 - RNA, 100 nt, synthetic construct
  source 1..100: mol_type = other RNA
ctttcatctggcagagaagggttttagagctagaaatagcaagttaaaataaggctagtccgttatcaacttgaaaaagtggcaccgagtcggtgctttt

SEQ ID NO: 510 - RNA, 100 nt, synthetic construct
  source 1..100: mol_type = other RNA
gaatcacctgcaaggagagggttttagagctagaaatagcaagttaaaataaggctagtccgttatcaacttgaaaaagtggcaccgagtcggtgctttt

SEQ ID NO: 511 - RNA, 100 nt, synthetic construct; identical to SEQ ID NO: 468
  source 1..100: mol_type = other RNA

SEQ ID NO: 512 - RNA, 100 nt, synthetic construct
  source 1..100: mol_type = other RNA
tcacctgcaaggagaggagagttttagagctagaaatagcaagttaaaataaggctagtccgttatcaacttgaaaaagtggcaccgagtcggtgctttt

SEQ ID NO: 513 - RNA, 100 nt, synthetic construct; identical to SEQ ID NO: 454
  source 1..100: mol_type = other RNA

SEQ ID NO: 514 - RNA, 100 nt, synthetic construct
  source 1..100: mol_type = other RNA
ctctcacctctgcaagtattgttttagagctagaaatagcaagttaaaataaggctagtccgttatcaacttgaaaaagtggcaccgagtcggtgctttt

SEQ ID NO: 515 - RNA, 100 nt, synthetic construct
  source 1..100: mol_type = other RNA
tctctcacctctgcaagtatgttttagagctagaaatagcaagttaaaataaggctagtccgttatcaacttgaaaaagtggcaccgagtcggtgctttt

SEQ ID NO: 516 - RNA, 109 nt, synthetic construct
  source 1..109: mol_type = other RNA
tgttgttcccctgggtgccaggttttagtactctgtaatgaaaattacagaatctactaaaacaaggcaaaatgccgtgtttatctcgtcaacttgttggcgagatttt

SEQ ID NO: 517 - RNA, 109 nt, synthetic construct
  source 1..109: mol_type = other RNA
ggctttcatctggcagagaaggttttagtactctgtaatgaaaattacagaatctactaaaacaaggcaaaatgccgtgtttatctcgtcaacttgttggcgagatttt

SEQ ID NO: 518 - RNA, 109 nt, synthetic construct
  source 1..109: mol_type = other RNA
ttctctcacctctgcaagtatgttttagtactctgtaatgaaaattacagaatctactaaaacaaggcaaaatgccgtgtttatctcgtcaacttgttggcgagatttt

SEQ ID NO: 519 - RNA, 109 nt, synthetic construct
  source 1..109: mol_type = other RNA
gaaagcttcggccacctcttggttttagtactctgtaatgaaaattacagaatctactaaaacaaggcaaaatgccgtgtttatctcgtcaacttgttggcgagatttt

SEQ ID NO: 520 - RNA, 109 nt, synthetic construct; identical to SEQ ID NO: 516
  source 1..109: mol_type = other RNA

SEQ ID NO: 521 - RNA, 109 nt, synthetic construct
  source 1..109: mol_type = other RNA
gtctgatccatctagcaccaggttttagtactctgtaatgaaaattacagaatctactaaaacaaggcaaaatgccgtgtttatctcgtcaacttgttggcgagatttt

SEQ ID NO: 522 - RNA, 109 nt, synthetic construct
  source 1..109: mol_type = other RNA
cttctgaccatcagtcatgaggttttagtactctgtaatgaaaattacagaatctactaaaacaaggcaaaatgccgtgtttatctcgtcaacttgttggcgagatttt

SEQ ID NO: 523 - RNA, 109 nt, synthetic construct; identical to SEQ ID NO: 517
  source 1..109: mol_type = other RNA

SEQ ID NO: 524 - RNA, 109 nt, synthetic construct; identical to SEQ ID NO: 518
  source 1..109: mol_type = other RNA

SEQ ID NO: 525 - RNA, 100 nt, synthetic construct; identical to SEQ ID NO: 484
  source 1..100: mol_type = other RNA

SEQ ID NO: 526 - RNA, 100 nt, synthetic construct; identical to SEQ ID NO: 485
  source 1..100: mol_type = other RNA

SEQ ID NO: 527 - RNA, 100 nt, synthetic construct
  source 1..100: mol_type = other RNA
tgtctgatccatctagcaccgttttagagctagaaatagcaagttaaaataaggctagtccgttatcaacttgaaaaagtggcaccgagtcggtgctttt

SEQ ID NO: 528 - RNA, 100 nt, synthetic construct; identical to SEQ ID NO: 483
  source 1..100: mol_type = other RNA

SEQ ID NO: 529 - RNA, 100 nt, synthetic construct; identical to SEQ ID NO: 482
  source 1..100: mol_type = other RNA

SEQ ID NO: 530 - RNA, 100 nt, synthetic construct; identical to SEQ ID NO: 481
  source 1..100: mol_type = other RNA

SEQ ID NO: 531 - RNA, 100 nt, synthetic construct
  source 1..100: mol_type = other RNA
cgggcatccccattggcacagttttagagctagaaatagcaagttaaaataaggctagtccgttatcaacttgaaaaagtggcaccgagtcggtgctttt

SEQ ID NO: 532 - RNA, 100 nt, synthetic construct
  source 1..100: mol_type = other RNA
catccccattggcacaaggagttttagagctagaaatagcaagttaaaataaggctagtccgttatcaacttgaaaaagtggcaccgagtcggtgctttt

SEQ ID NO: 533 - RNA, 100 nt, synthetic construct; identical to SEQ ID NO: 500
  source 1..100: mol_type = other RNA

SEQ ID NO: 534 - RNA, 100 nt, synthetic construct; identical to SEQ ID NO: 501
  source 1..100: mol_type = other RNA

SEQ ID NO: 535 - RNA, 100 nt, synthetic construct
  source 1..100: mol_type = other RNA
acgtcatagtcataaaattcgttttagagctagaaatagcaagttaaaataaggctagtccgttatcaacttgaaaaagtggcaccgagtcggtgctttt

SEQ ID NO: 536 - RNA, 100 nt, synthetic construct
  source 1..100: mol_type = other RNA
ttccgcttctgttgttccccgttttagagctagaaatagcaagttaaaataaggctagtccgttatcaacttgaaaaagtggcaccgagtcggtgctttt

SEQ ID NO: 537 - RNA, 100 nt, synthetic construct; identical to SEQ ID NO: 474
  source 1..100: mol_type = other RNA

SEQ ID NO: 538 - RNA, 100 nt, synthetic construct; identical to SEQ ID NO: 475
  source 1..100: mol_type = other RNA

SEQ ID NO: 539 - RNA, 100 nt, synthetic construct
  source 1..100: mol_type = other RNA
gccgccagaatcacctgcaagttttagagctagaaatagcaagttaaaataaggctagtccgttatcaacttgaaaaagtggcaccgagtcggtgctttt

SEQ ID NO: 540 - RNA, 100 nt, synthetic construct
  source 1..100: mol_type = other RNA
cgccagaatcacctgcaagggttttagagctagaaatagcaagttaaaataaggctagtccgttatcaacttgaaaaagtggcaccgagtcggtgctttt

SEQ ID NO: 541 - RNA, 100 nt, synthetic construct; identical to SEQ ID NO: 506
  source 1..100: mol_type = other RNA

SEQ ID NO: 542 - RNA, 100 nt, synthetic construct
  source 1..100: mol_type = other RNA
gggcatccccattggcacaagttttagagctagaaatagcaagttaaaataaggctagtccgttatcaacttgaaaaagtggcaccgagtcggtgctttt

SEQ ID NO: 543 - RNA, 100 nt, synthetic construct; identical to SEQ ID NO: 498
  source 1..100: mol_type = other RNA

SEQ ID NO: 544 - RNA, 100 nt, synthetic construct
  source 1..100: mol_type = other RNA
aggtgattctggcggcccctgttttagagctagaaatagcaagttaaaataaggctagtccgttatcaacttgaaaaagtggcaccgagtcggtgctttt

SEQ ID NO: 545 - RNA, 100 nt, synthetic construct
  source 1..100: mol_type = other RNA
cgtcatagtcataaaattcagttttagagctagaaatagcaagttaaaataaggctagtccgttatcaacttgaaaaagtggcaccgagtcggtgctttt

SEQ ID NO: 546 - RNA, 100 nt, synthetic construct; identical to SEQ ID NO: 479
  source 1..100: mol_type = other RNA

SEQ ID NO: 547 - RNA, 100 nt, synthetic construct; identical to SEQ ID NO: 480
  source 1..100: mol_type = other RNA

SEQ ID NO: 548 - RNA, 100 nt, synthetic construct
  source 1..100: mol_type = other RNA
ctatgacgttgccctgatcagttttagagctagaaatagcaagttaaaataaggctagtccgttatcaacttgaaaaagtggcaccgagtcggtgctttt

SEQ ID NO: 549 - RNA, 109 nt, synthetic construct; identical to SEQ ID NO: 473
  source 1..109: mol_type = other RNA

SEQ ID NO: 550 - RNA, 109 nt, synthetic construct; identical to SEQ ID NO: 470
  source 1..109: mol_type = other RNA

SEQ ID NO: 551 - RNA, 109 nt, synthetic construct; identical to SEQ ID NO: 493
  source 1..109: mol_type = other RNA

SEQ ID NO: 552 - RNA, 109 nt, synthetic construct; identical to SEQ ID NO: 491
  source 1..109: mol_type = other RNA

SEQ ID NO: 553 - RNA, 109 nt, synthetic construct; identical to SEQ ID NO: 490
  source 1..109: mol_type = other RNA

SEQ ID NO: 554 - RNA, 109 nt, synthetic construct; identical to SEQ ID NO: 521
  source 1..109: mol_type = other RNA

SEQ ID NO: 555 - RNA, 109 nt, synthetic construct
  source 1..109: mol_type = other RNA
gggcatccccattggcacaaggttttagtactctgtaatgaaaattacagaatctactaaaacaaggcaaaatgccgtgtttatctcgtcaacttgttggcgagatttt

SEQ ID NO: 556 - RNA, 109 nt, synthetic construct
  source 1..109: mol_type = other RNA
aggtgattctggcggccccttgttttagtactctgtaatgaaaattacagaatctactaaaacaaggcaaaatgccgtgtttatctcgtcaacttgttggcgagatttt

SEQ ID NO: 557 - RNA, 100 nt, synthetic construct
  source 1..100: mol_type = other RNA
ctagatggatcagacagcatgttttagagctagaaatagcaagttaaaataaggctagtccgttatcaacttgaaaaagtggcaccgagtcggtgctttt

SEQ ID NO: 558 - RNA, 100 nt, synthetic construct
  source 1..100: mol_type = other RNA
tagatggatcagacagcattgttttagagctagaaatagcaagttaaaataaggctagtccgttatcaacttgaaaaagtggcaccgagtcggtgctttt

SEQ ID NO: 559 - RNA, 100 nt, synthetic construct
  source 1..100: mol_type = other RNA
tggctttcatctggcagagagttttagagctagaaatagcaagttaaaataaggctagtccgttatcaacttgaaaaagtggcaccgagtcggtgctttt

SEQ ID NO: 560 - RNA, 100 nt, synthetic construct
  source 1..100: mol_type = other RNA
ctgttgttcccctgggtgccgttttagagctagaaatagcaagttaaaataaggctagtccgttatcaacttgaaaaagtggcaccgagtcggtgctttt

SEQ ID NO: 561 - RNA, 100 nt, synthetic construct
  source 1..100: mol_type = other RNA
aaagcttcggccacctcttggttttagagctagaaatagcaagttaaaataaggctagtccgttatcaacttgaaaaagtggcaccgagtcggtgctttt

SEQ ID NO: 562 - RNA, 100 nt, synthetic construct
  source 1..100: mol_type = other RNA
aagcttcggccacctcttgagttttagagctagaaatagcaagttaaaataaggctagtccgttatcaacttgaaaaagtggcaccgagtcggtgctttt

SEQ ID NO: 563 - RNA, 100 nt, synthetic construct
  source 1..100: mol_type = other RNA
agcttcggccacctcttgaggttttagagctagaaatagcaagttaaaataaggctagtccgttatcaacttgaaaaagtggcaccgagtcggtgctttt

SEQ ID NO: 564 - RNA, 100 nt, synthetic construct
  source 1..100: mol_type = other RNA
cgaagctttcctgtcttcccgttttagagctagaaatagcaagttaaaataaggctagtccgttatcaacttgaaaaagtggcaccgagtcggtgctttt

SEQ ID NO: 565 - RNA, 100 nt, synthetic construct
  source 1..100: mol_type = other RNA
ggctttcatctggcagagaagttttagagctagaaatagcaagttaaaataaggctagtccgttatcaacttgaaaaagtggcaccgagtcggtgctttt

SEQ ID NO: 566 - RNA, 100 nt, synthetic construct
  source 1..100: mol_type = other RNA
tgttgttcccctgggtgccagttttagagctagaaatagcaagttaaaataaggctagtccgttatcaacttgaaaaagtggcaccgagtcggtgctttt

SEQ ID NO: 567 - RNA, 109 nt, synthetic construct; identical to SEQ ID NO: 519
  source 1..109: mol_type = other RNA

SEQ ID NO: 568 - RNA, 100 nt, synthetic construct
  source 1..100: mol_type = other RNA
ctgcaggattgcacaacatggttttagagctagaaatagcaagttaaaataaggctagtccgttatcaacttgaaaaagtggcaccgagtcggtgctttt

SEQ ID NO: 569 - RNA, 100 nt, synthetic construct
  source 1..100: mol_type = other RNA
ataggcccatttgtctccccgttttagagctagaaatagcaagttaaaataaggctagtccgttatcaacttgaaaaagtggcaccgagtcggtgctttt

SEQ ID NO: 570 - RNA, 100 nt, synthetic construct
  source 1..100: mol_type = other RNA
ctctgcaggttggtgtaatcgttttagagctagaaatagcaagttaaaataaggctagtccgttatcaacttgaaaaagtggcaccgagtcggtgctttt

SEQ ID NO: 571 - RNA, 100 nt, synthetic construct
  source 1..100: mol_type = other RNA
acgctctcacctgatagtctgttttagagctagaaatagcaagttaaaataaggctagtccgttatcaacttgaaaaagtggcaccgagtcggtgctttt

SEQ ID NO: 572 - RNA, 100 nt, synthetic construct
  source 1..100: mol_type = other RNA
cttacaatgactgagatcttgttttagagctagaaatagcaagttaaaataaggctagtccgttatcaacttgaaaaagtggcaccgagtcggtgctttt

SEQ ID NO: 573 - RNA, 100 nt, synthetic construct
  source 1..100: mol_type = other RNA
tcacctccgttgtcacagatgttttagagctagaaatagcaagttaaaataaggctagtccgttatcaacttgaaaaagtggcaccgagtcggtgctttt

SEQ ID NO: 574 - RNA, 100 nt, synthetic construct
  source 1..100: mol_type = other RNA
tcgcttacctccagacaagagttttagagctagaaatagcaagttaaaataaggctagtccgttatcaacttgaaaaagtggcaccgagtcggtgctttt

SEQ ID NO: 575 - RNA, 100 nt, synthetic construct
  source 1..100: mol_type = other RNA
cacccacaggtggcaagttagttttagagctagaaatagcaagttaaaataaggctagtccgttatcaacttgaaaaagtggcaccgagtcggtgctttt

SEQ ID NO: 576 - RNA, 100 nt, synthetic construct
  source 1..100: mol_type = other RNA
acagaccacaagttgaagtcgttttagagctagaaatagcaagttaaaataaggctagtccgttatcaacttgaaaaagtggcaccgagtcggtgctttt

SEQ ID NO: 577 - RNA, 100 nt, synthetic construct
  source 1..100: mol_type = other RNA
tctgcaggattgcacaacatgttttagagctagaaatagcaagttaaaataaggctagtccgttatcaacttgaaaaagtggcaccgagtcggtgctttt

SEQ ID NO: 578 - RNA, 100 nt, synthetic construct
  source 1..100: mol_type = other RNA
gcaggattgcacaacatggggttttagagctagaaatagcaagttaaaataaggctagtccgttatcaacttgaaaaagtggcaccgagtcggtgctttt

SEQ ID NO: 579 - RNA, 100 nt, synthetic construct
  source 1..100: mol_type = other RNA
ccctcagatgtctatgtgttgttttagagctagaaatagcaagttaaaataaggctagtccgttatcaacttgaaaaagtggcaccgagtcggtgctttt

SEQ ID NO: 580 - RNA, 100 nt, synthetic construct; identical to SEQ ID NO: 449
  source 1..100: mol_type = other RNA

SEQ ID NO: 581 - RNA, 100 nt, synthetic construct
  source 1..100: mol_type = other RNA
ctcagatgtctatgtgtttggttttagagctagaaatagcaagttaaaataaggctagtccgttatcaacttgaaaaagtggcaccgagtcggtgctttt

SEQ ID NO: 582 - RNA, 100 nt, synthetic construct
  source 1..100: mol_type = other RNA
gtgtccccagcgcccttcaagttttagagctagaaatagcaagttaaaataaggctagtccgttatcaacttgaaaaagtggcaccgagtcggtgctttt

SEQ ID NO: 583 - RNA, 100 nt, synthetic construct
  source 1..100: mol_type = other RNA
tgtccccagcgcccttcaaagttttagagctagaaatagcaagttaaaataaggctagtccgttatcaacttgaaaaagtggcaccgagtcggtgctttt

SEQ ID NO: 584 - RNA, 100 nt, synthetic construct
  source 1..100: mol_type = other RNA
ctacttcaggaggggagaaggttttagagctagaaatagcaagttaaaataaggctagtccgttatcaacttgaaaaagtggcaccgagtcggtgctttt

SEQ ID NO: 585 - RNA, 100 nt, synthetic construct
  source 1..100: mol_type = other RNA
tacttcaggaggggagaagcgttttagagctagaaatagcaagttaaaataaggctagtccgttatcaacttgaaaaagtggcaccgagtcggtgctttt

SEQ ID NO: 586 - RNA, 100 nt, synthetic construct
  source 1..100: mol_type = other RNA
ctccttgcaggtgattctgggttttagagctagaaatagcaagttaaaataaggctagtccgttatcaacttgaaaaagtggcaccgagtcggtgctttt

SEQ ID NO: 587 - RNA, 100 nt, synthetic construct
  source 1..100: mol_type = other RNA
tgcaggttggtgtaatcagcgttttagagctagaaatagcaagttaaaataaggctagtccgttatcaacttgaaaaagtggcaccgagtcggtgctttt

SEQ ID NO: 588 - RNA, 100 nt, synthetic construct
  source 1..100: mol_type = other RNA
gcaggttggtgtaatcagctgttttagagctagaaatagcaagttaaaataaggctagtccgttatcaacttgaaaaagtggcaccgagtcggtgctttt

SEQ ID NO: 589 - RNA, 100 nt, synthetic construct; identical to SEQ ID NO: 454
  source 1..100: mol_type = other RNA

SEQ ID NO: 590 - RNA, 100 nt, synthetic construct
  source 1..100: mol_type = other RNA
cttactttgttgctggcaaggttttagagctagaaatagcaagttaaaataaggctagtccgttatcaacttgaaaaagtggcaccgagtcggtgctttt

SEQ ID NO: 591 - RNA, 100 nt, synthetic construct; identical to SEQ ID NO: 459
  source 1..100: mol_type = other RNA

SEQ ID NO: 592 - RNA, 100 nt, synthetic construct
  source 1..100: mol_type = other RNA
tcacccagataatcctccctgttttagagctagaaatagcaagttaaaataaggctagtccgttatcaacttgaaaaagtggcaccgagtcggtgctttt

SEQ ID NO: 593 - RNA, 100 nt, synthetic construct
  source 1..100: mol_type = other RNA
ccttctgaccatcagtcatggttttagagctagaaatagcaagttaaaataaggctagtccgttatcaacttgaaaaagtggcaccgagtcggtgctttt

SEQ ID NO: 594 - RNA, 100 nt, synthetic construct
  source 1..100: mol_type = other RNA
caaaggtcaccttggcaggagttttagagctagaaatagcaagttaaaataaggctagtccgttatcaacttgaaaaagtggcaccgagtcggtgctttt

SEQ ID NO: 595 - RNA, 100 nt, synthetic construct
  source 1..100: mol_type = other RNA
ctcgcttacctccagacaaggttttagagctagaaatagcaagttaaaataaggctagtccgttatcaacttgaaaaagtggcaccgagtcggtgctttt

SEQ ID NO: 596 - RNA, 100 nt, synthetic construct
  source 1..100: mol_type = other RNA
tcaaagcaatccactgtccagttttagagctagaaatagcaagttaaaataaggctagtccgttatcaacttgaaaaagtggcaccgagtcggtgctttt

SEQ ID NO: 597 - RNA, 100 nt, synthetic construct
  source 1..100: mol_type = other RNA
ctcccagactccttcatgtagttttagagctagaaatagcaagttaaaataaggctagtccgttatcaacttgaaaaagtggcaccgagtcggtgctttt

SEQ ID NO: 598 - RNA, 100 nt, synthetic construct; identical to SEQ ID NO: 496
  source 1..100: mol_type = other RNA

SEQ ID NO: 599 - RNA, 100 nt, synthetic construct
  source 1..100: mol_type = other RNA
acaggtggcaagttatggtggttttagagctagaaatagcaagttaaaataaggctagtccgttatcaacttgaaaaagtggcaccgagtcggtgctttt

SEQ ID NO: 600 - RNA, 100 nt, synthetic construct; identical to SEQ ID NO: 499
  source 1..100: mol_type = other RNA

SEQ ID NO: 601 - RNA, 100 nt, synthetic construct
  source 1..100: mol_type = other RNA
gtccccagcgcccttcaaaggttttagagctagaaatagcaagttaaaataaggctagtccgttatcaacttgaaaaagtggcaccgagtcggtgctttt

SEQ ID NO: 602 - RNA, 100 nt, synthetic construct
  source 1..100: mol_type = other RNA
tacagaaaggcagctgtgaggttttagagctagaaatagcaagttaaaataaggctagtccgttatcaacttgaaaaagtggcaccgagtcggtgctttt

SEQ ID NO: 603 - RNA, 100 nt, synthetic construct
  source 1..100: mol_type = other RNA
gaggactcacttgaatgaaagttttagagctagaaatagcaagttaaaataaggctagtccgttatcaacttgaaaaagtggcaccgagtcggtgctttt

SEQ ID NO: 604 - RNA, 100 nt, synthetic construct
  source 1..100: mol_type = other RNA
tctcaccttatccccattctgttttagagctagaaatagcaagttaaaataaggctagtccgttatcaacttgaaaaagtggcaccgagtcggtgctttt

SEQ ID NO: 605 - RNA, 100 nt, synthetic construct
  source 1..100: mol_type = other RNA
atccttacctacgctgacctgttttagagctagaaatagcaagttaaaataaggctagtccgttatcaacttgaaaaagtggcaccgagtcggtgctttt

SEQ ID NO: 606 - RNA, 100 nt, synthetic construct
  source 1..100: mol_type = other RNA
ttacctacgctgaccttgatgttttagagctagaaatagcaagttaaaataaggctagtccgttatcaacttgaaaaagtggcaccgagtcggtgctttt

SEQ ID NO: 607 - RNA, 100 nt, synthetic construct
  source 1..100: mol_type = other RNA
ctccctaccgatcatttggtgttttagagctagaaatagcaagttaaaataaggctagtccgttatcaacttgaaaaagtggcaccgagtcggtgctttt

SEQ ID NO: 608 - RNA, 100 nt, synthetic construct; identical to SEQ ID NO: 508
  source 1..100: mol_type = other RNA

SEQ ID NO: 609 - RNA, 100 nt, synthetic construct
  source 1..100: mol_type = other RNA
cttctcacctccgttgtcacgttttagagctagaaatagcaagttaaaataaggctagtccgttatcaacttgaaaaagtggcaccgagtcggtgctttt

SEQ ID NO: 610 - RNA, 109 nt, synthetic construct
  source 1..109: mol_type = other RNA
tccctcagatgtctatgtgttgttttagtactctgtaatgaaaattacagaatctactaaaacaaggcaaaatgccgtgtttatctcgtcaacttgttggcgagatttt

SEQ ID NO: 611 - RNA, 109 nt, synthetic construct; identical to SEQ ID NO: 502
  source 1..109: mol_type = other RNA

SEQ ID NO: 612 - RNA, 109 nt, synthetic construct; identical to SEQ ID NO: 518
  source 1..109: mol_type = other RNA

SEQ ID NO: 613 - RNA, 109 nt, synthetic construct
  source 1..109: mol_type = other RNA
ccttacctacgctgaccttgagttttagtactctgtaatgaaaattacagaatctactaaaacaaggcaaaatgccgtgtttatctcgtcaacttgttggcgagatttt

SEQ ID NO: 614 - RNA, 109 nt, synthetic construct
  source 1..109: mol_type = other RNA
actcacccagataatcctcccgttttagtactctgtaatgaaaattacagaatctactaaaacaaggcaaaatgccgtgtttatctcgtcaacttgttggcgagatttt

SEQ ID NO: 615 - RNA, 109 nt, synthetic construct
  source 1..109: mol_type = other RNA
tcccttctgaccatcagtcatgttttagtactctgtaatgaaaattacagaatctactaaaacaaggcaaaatgccgtgtttatctcgtcaacttgttggcgagatttt

SEQ ID NO: 616 - RNA, 109 nt, synthetic construct
  source 1..109: mol_type = other RNA
cttcaggtgtgaccaccactcgttttagtactctgtaatgaaaattacagaatctactaaaacaaggcaaaatgccgtgtttatctcgtcaacttgttggcgagatttt

SEQ ID NO: 617 - RNA, 109 nt, synthetic construct
  source 1..109: mol_type = other RNA
ccctctccacagaccacaagtgttttagtactctgtaatgaaaattacagaatctactaaaacaaggcaaaatgccgtgtttatctcgtcaacttgttggcgagatttt

SEQ ID NO: 618 - RNA, 109 nt, synthetic construct
  source 1..109: mol_type = other RNA
ctacagaaaggcagctgtgaggttttagtactctgtaatgaaaattacagaatctactaaaacaaggcaaaatgccgtgtttatctcgtcaacttgttggcgagatttt

SEQ ID NO: 619 - RNA, 109 nt, synthetic construct
  source 1..109: mol_type = other RNA
gtatgtcttactttgttgctggttttagtactctgtaatgaaaattacagaatctactaaaacaaggcaaaatgccgtgtttatctcgtcaacttgttggcgagatttt

SEQ ID NO: 620 - RNA, 109 nt, synthetic construct
  source 1..109: mol_type = other RNA
tgtcttactttgttgctggcagttttagtactctgtaatgaaaattacagaatctactaaaacaaggcaaaatgccgtgtttatctcgtcaacttgttggcgagatttt

SEQ ID NO: 621 - RNA, 109 nt, synthetic construct
  source 1..109: mol_type = other RNA
tgcatccttacctacgctgacgttttagtactctgtaatgaaaattacagaatctactaaaacaaggcaaaatgccgtgtttatctcgtcaacttgttggcgagatttt

SEQ ID NO: 622 - RNA, 109 nt, synthetic construct
  source 1..109: mol_type = other RNA
ggattctgtgcttacaatgacgttttagtactctgtaatgaaaattacagaatctactaaaacaaggcaaaatgccgtgtttatctcgtcaacttgttggcgagatttt

SEQ ID NO: 623 - RNA, 109 nt, synthetic construct
  source 1..109: mol_type = other RNA
cttgtatctccctaccgatcagttttagtactctgtaatgaaaattacagaatctactaaaacaaggcaaaatgccgtgtttatctcgtcaacttgttggcgagatttt

SEQ ID NO: 624 - RNA, 109 nt, synthetic construct; identical to SEQ ID NO: 522
  source 1..109: mol_type = other RNA

SEQ ID NO: 625 - RNA, 109 nt, synthetic construct
  source 1..109: mol_type = other RNA
ccctaacctctgaccttcatagttttagtactctgtaatgaaaattacagaatctactaaaacaaggcaaaatgccgtgtttatctcgtcaacttgttggcgagatttt

SEQ ID NO: 626 - RNA, 109 nt, synthetic construct
  source 1..109: mol_type = other RNA
aggaggattccaccttctcaagttttagtactctgtaatgaaaattacagaatctactaaaacaaggcaaaatgccgtgtttatctcgtcaacttgttggcgagatttt

SEQ ID NO: 627 - RNA, 109 nt, synthetic construct
  source 1..109: mol_type = other RNA
atgcttctcacctccgttgtcgttttagtactctgtaatgaaaattacagaatctactaaaacaaggcaaaatgccgtgtttatctcgtcaacttgttggcgagatttt

SEQ ID NO: 628 - RNA, 109 nt, synthetic construct
  source 1..109: mol_type = other RNA
ttctccaagagggccaggcacgttttagtactctgtaatgaaaattacagaatctactaaaacaaggcaaaatgccgtgtttatctcgtcaacttgttggcgagatttt

SEQ ID NO: 629 - RNA, 109 nt, synthetic construct
  source 1..109: mol_type = other RNA
accaaaagactgtcaggaagggttttagtactctgtaatgaaaattacagaatctactaaaacaaggcaaaatgccgtgtttatctcgtcaacttgttggcgagatttt

SEQ ID NO: 630 - RNA, 109 nt, synthetic construct
  source 1..109: mol_type = other RNA
acctgccaagtgaatggccgagttttagtactctgtaatgaaaattacagaatctactaaaacaaggcaaaatgccgtgtttatctcgtcaacttgttggcgagatttt

SEQ ID NO: 631 - RNA, 109 nt, synthetic construct
  source 1..109: mol_type = other RNA
gagcaacatgtgttcaaagtcgttttagtactctgtaatgaaaattacagaatctactaaaacaaggcaaaatgccgtgtttatctcgtcaacttgttggcgagatttt

SEQ ID NO: 632 - RNA, 109 nt, synthetic construct
  source 1..109: mol_type = other RNA
tacaccaacctgcagaggcaggttttagtactctgtaatgaaaattacagaatctactaaaacaaggcaaaatgccgtgtttatctcgtcaacttgttggcgagatttt

SEQ ID NO: 633 - RNA, 109 nt, synthetic construct; identical to SEQ ID NO: 517
  source 1..109: mol_type = other RNA

SEQ ID NO: 634 - RNA, 109 nt, synthetic construct
  source 1..109: mol_type = other RNA
gacatctgagggataaaaagggttttagtactctgtaatgaaaattacagaatctactaaaacaaggcaaaatgccgtgtttatctcgtcaacttgttggcgagatttt

SEQ ID NO: 635 - RNA, 109 nt, synthetic construct; identical to SEQ ID NO: 516
  source 1..109: mol_type = other RNA

SEQ ID NO: 636 - RNA, 109 nt, synthetic construct
  source 1..109: mol_type = other RNA
atcgcacctgccaagtgaatggttttagtactctgtaatgaaaattacagaatctactaaaacaaggcaaaatgccgtgtttatctcgtcaacttgttggcgagatttt

SEQ ID NO: 637 - RNA, 109 nt, synthetic construct
  source 1..109: mol_type = other RNA
tggccgatggagtgggcagacgttttagtactctgtaatgaaaattacagaatctactaaaacaaggcaaaatgccgtgtttatctcgtcaacttgttggcgagatttt

SEQ ID NO: 638 - RNA, 109 nt, synthetic construct
  source 1..109: mol_type = other RNA
tcccagcggcgaacgtgtcaggttttagtactctgtaatgaaaattacagaatctactaaaacaaggcaaaatgccgtgtttatctcgtcaacttgttggcgagatttt

SEQ ID NO: 639 - RNA, 109 nt, synthetic construct; identical to SEQ ID NO: 503
  source 1..109: mol_type = other RNA

SEQ ID NO: 640 - RNA, 109 nt, synthetic construct
  source 1..109: mol_type = other RNA
gtcacgaagcagctcaatgaagttttagtactctgtaatgaaaattacagaatctactaaaacaaggcaaaatgccgtgtttatctcgtcaacttgttggcgagatttt

SEQ ID NO: 641 - RNA, 109 nt, synthetic construct
  source 1..109: mol_type = other RNA
ggccctccaggcagtgtacaggttttagtactctgtaatgaaaattacagaatctactaaaacaaggcaaaatgccgtgtttatctcgtcaacttgttggcgagatttt

SEQ ID NO: 642 - RNA, 109 nt, synthetic construct
  source 1..109: mol_type = other RNA
tttctaccaaatgatcggtaggttttagtactctgtaatgaaaattacagaatctactaaaacaaggcaaaatgccgtgtttatctcgtcaacttgttggcgagatttt

SEQ ID NO: 643 - RNA, 109 nt, synthetic construct
  source 1..109: mol_type = other RNA
gcaaccatggcaggccaagatgttttagtactctgtaatgaaaattacagaatctactaaaacaaggcaaaatgccgtgtttatctcgtcaacttgttggcgagatttt

SEQ ID NO: 644 - RNA, 109 nt, synthetic construct
  source 1..109: mol_type = other RNA
tcagccagggcagcacttgaagttttagtactctgtaatgaaaattacagaatctactaaaacaaggcaaaatgccgtgtttatctcgtcaacttgttggcgagatttt

SEQ ID NO: 645 - RNA, 109 nt, synthetic construct
  source 1..109: mol_type = other RNA
cttactttgttgctggcaagtgttttagtactctgtaatgaaaattacagaatctactaaaacaaggcaaaatgccgtgtttatctcgtcaacttgttggcgagatttt

SEQ ID NO: 646 - RNA, 109 nt, synthetic construct
  source 1..109: mol_type = other RNA
ctcccctcctgaagtaggagagttttagtactctgtaatgaaaattacagaatctactaaaacaaggcaaaatgccgtgtttatctcgtcaacttgttggcgagatttt

SEQ ID NO: 647 - RNA, 109 nt, synthetic construct
  source 1..109: mol_type = other RNA
tttgaagggcgctggggacacgttttagtactctgtaatgaaaattacagaatctactaaaacaaggcaaaatgccgtgtttatctcgtcaacttgttggcgagatttt

SEQ ID NO: 648 - RNA, 109 nt, synthetic construct
  source 1..109: mol_type = other RNA
tcttggcctgccatggttgctgttttagtactctgtaatgaaaattacagaatctactaaaacaaggcaaaatgccgtgtttatctcgtcaacttgttggcgagatttt

SEQ ID NO: 649 - RNA, 109 nt, synthetic construct
  source 1..109: mol_type = other RNA
tggcctgccatggttgcttgtgttttagtactctgtaatgaaaattacagaatctactaaaacaaggcaaaatgccgtgtttatctcgtcaacttgttggcgagatttt

SEQ ID NO: 650 - RNA, 109 nt, synthetic construct
  source 1..109: mol_type = other RNA
atgaaggagtctgggagagtcgttttagtactctgtaatgaaaattacagaatctactaaaacaaggcaaaatgccgtgtttatctcgtcaacttgttggcgagatttt

SEQ ID NO: 651 - RNA, 109 nt, synthetic construct
  source 1..109: mol_type = other RNA
ggagtctgggagagtcagaaagttttagtactctgtaatgaaaattacagaatctactaaaacaaggcaaaatgccgtgtttatctcgtcaacttgttggcgagatttt

SEQ ID NO: 652 - RNA, 109 nt, synthetic construct
  source 1..109: mol_type = other RNA
cgctgcagaggtatgagacatgttttagtactctgtaatgaaaattacagaatctactaaaacaaggcaaaatgccgtgtttatctcgtcaacttgttggcgagatttt

SEQ ID NO: 653 - RNA, 109 nt, synthetic construct
  source 1..109: mol_type = other RNA
actccatcggccattcacttggttttagtactctgtaatgaaaattacagaatctactaaaacaaggcaaaatgccgtgtttatctcgtcaacttgttggcgagatttt

SEQ ID NO: 654 - RNA, 109 nt, synthetic construct
  source 1..109: mol_type = other RNA
ggggccagtattccccgttctgttttagtactctgtaatgaaaattacagaatctactaaaacaaggcaaaatgccgtgtttatctcgtcaacttgttggcgagatttt

SEQ ID NO: 655 - RNA, 109 nt, synthetic construct
  source 1..109: mol_type = other RNA
ggattgctttgagaagggggggttttagtactctgtaatgaaaattacagaatctactaaaacaaggcaaaatgccgtgtttatctcgtcaacttgttggcgagatttt

SEQ ID NO: 656 - RNA, 109 nt, synthetic construct
  source 1..109: mol_type = other RNA
ttcagggtgctccaggaccccgttttagtactctgtaatgaaaattacagaatctactaaaacaaggcaaaatgccgtgtttatctcgtcaacttgttggcgagatttt

SEQ ID NO: 657 - RNA, 109 nt, synthetic construct
  source 1..109: mol_type = other RNA
gctccaggaccccgtagatctgttttagtactctgtaatgaaaattacagaatctactaaaacaaggcaaaatgccgtgtttatctcgtcaacttgttggcgagatttt

SEQ ID NO: 658 - RNA, 109 nt, synthetic construct
  source 1..109: mol_type = other RNA
tggtcacacctgaagagaaaggttttagtactctgtaatgaaaattacagaatctactaaaacaaggcaaaatgccgtgtttatctcgtcaacttgttggcgagatttt

SEQ ID NO: 659 - RNA, 109 nt, synthetic construct
  source 1..109: mol_type = other RNA
cttacctccagacaagaggccgttttagtactctgtaatgaaaattacagaatctactaaaacaaggcaaaatgccgtgtttatctcgtcaacttgttggcgagatttt

SEQ ID NO: 660 - RNA, 100 nt, synthetic construct
  source 1..100: mol_type = other RNA
ctccttccgacttctccaaggttttagagctagaaatagcaagttaaaataaggctagtccgttatcaacttgaaaaagtggcaccgagtcggtgctttt

SEQ ID NO: 661 - RNA, 100 nt, synthetic construct
  source 1..100: mol_type = other RNA
tccttccgacttctccaagagttttagagctagaaatagcaagttaaaataaggctagtccgttatcaacttgaaaaagtggcaccgagtcggtgctttt

SEQ ID NO: 662 - RNA, 100 nt, synthetic construct
  source 1..100: mol_type = other RNA
tctccaagagggccaggcacgttttagagctagaaatagcaagttaaaataaggctagtccgttatcaacttgaaaaagtggcaccgagtcggtgctttt

SEQ ID NO: 663 - RNA, 100 nt, synthetic construct
  source 1..100: mol_type = other RNA
ctcaagaccaaaagactgtcgttttagagctagaaatagcaagttaaaataaggctagtccgttatcaacttgaaaaagtggcaccgagtcggtgctttt

SEQ ID NO: 664 - RNA, 100 nt, synthetic construct
  source 1..100: mol_type = other RNA
agaccaaaagactgtcaggagttttagagctagaaatagcaagttaaaataaggctagtccgttatcaacttgaaaaagtggcaccgagtcggtgctttt

SEQ ID NO: 665 - RNA, 100 nt, synthetic construct
  source 1..100: mol_type = other RNA
cctgccaagtgaatggccgagttttagagctagaaatagcaagttaaaataaggctagtccgttatcaacttgaaaaagtggcaccgagtcggtgctttt

SEQ ID NO: 666 - RNA, 100 nt, synthetic construct
  source 1..100: mol_type = other RNA
ctcccagcggcgaacgtgtcgttttagagctagaaatagcaagttaaaataaggctagtccgttatcaacttgaaaaagtggcaccgagtcggtgctttt

SEQ ID NO: 667 - RNA, 100 nt, synthetic construct
  source 1..100: mol_type = other RNA
cagcggcgaacgtgtcaggagttttagagctagaaatagcaagttaaaataaggctagtccgttatcaacttgaaaaagtggcaccgagtcggtgctttt

SEQ ID NO: 668 - RNA, 100 nt, synthetic construct
  source 1..100: mol_type = other RNA
cggcgaacgtgtcaggaagggttttagagctagaaatagcaagttaaaataaggctagtccgttatcaacttgaaaaagtggcaccgagtcggtgctttt

SEQ ID NO: 669 - RNA, 100 nt, synthetic construct
  source 1..100: mol_type = other RNA
cgtgtcaggaaggtggctctgttttagagctagaaatagcaagttaaaataaggctagtccgttatcaacttgaaaaagtggcaccgagtcggtgctttt

SEQ ID NO: 670 - RNA, 100 nt, synthetic construct
  source 1..100: mol_type = other RNA
ttttctaccaaatgatcggtgttttagagctagaaatagcaagttaaaataaggctagtccgttatcaacttgaaaaagtggcaccgagtcggtgctttt

SEQ ID NO: 671 - RNA, 100 nt, synthetic construct
  source 1..100: mol_type = other RNA
tttctaccaaatgatcggtagttttagagctagaaatagcaagttaaaataaggctagtccgttatcaacttgaaaaagtggcaccgagtcggtgctttt

SEQ ID NO: 672 - RNA, 100 nt, synthetic construct
  source 1..100: mol_type = other RNA
gcaacaaagtaagacatactgttttagagctagaaatagcaagttaaaataaggctagtccgttatcaacttgaaaaagtggcaccgagtcggtgctttt

SEQ ID NO: 673 - RNA, 100 nt, synthetic construct
  source 1..100: mol_type = other RNA
acctctttcaagtgctgcccgttttagagctagaaatagcaagttaaaataaggctagtccgttatcaacttgaaaaagtggcaccgagtcggtgctttt

SEQ ID NO: 674 - RNA, 100 nt, synthetic construct
  source 1..100: mol_type = other RNA
gaaactccaagatgaggattgttttagagctagaaatagcaagttaaaataaggctagtccgttatcaacttgaaaaagtggcaccgagtcggtgctttt

SEQ ID NO: 675 - RNA, 100 nt, synthetic construct
  source 1..100: mol_type = other RNA
aaactccaagatgaggatttgttttagagctagaaatagcaagttaaaataaggctagtccgttatcaacttgaaaaagtggcaccgagtcggtgctttt

SEQ ID NO: 676 - RNA, 100 nt, synthetic construct
  source 1..100: mol_type = other RNA
caccaacctgcagaggcagtgttttagagctagaaatagcaagttaaaataaggctagtccgttatcaacttgaaaaagtggcaccgagtcggtgctttt

SEQ ID NO: 677 - RNA, 100 nt, synthetic construct
  source 1..100: mol_type = other RNA
accaacctgcagaggcagtggttttagagctagaaatagcaagttaaaataaggctagtccgttatcaacttgaaaaagtggcaccgagtcggtgctttt

SEQ ID NO: 678 - RNA, 100 nt, synthetic construct
  source 1..100: mol_type = other RNA
tgcctttctgtaggggaggtgttttagagctagaaatagcaagttaaaataaggctagtccgttatcaacttgaaaaagtggcaccgagtcggtgctttt

SEQ ID NO: 679 - RNA, 100 nt, synthetic construct
  source 1..100: mol_type = other RNA
aaatgggcctataaaggacagttttagagctagaaatagcaagttaaaataaggctagtccgttatcaacttgaaaaagtggcaccgagtcggtgctttt

SEQ ID NO: 680 - RNA, 100 nt, synthetic construct
  source 1..100: mol_type = other RNA
ccctcctgaagtaggagagtgttttagagctagaaatagcaagttaaaataaggctagtccgttatcaacttgaaaaagtggcaccgagtcggtgctttt

SEQ ID NO: 681 - RNA, 100 nt, synthetic construct
  source 1..100: mol_type = other RNA
tggcctgccatggttgcttggttttagagctagaaatagcaagttaaaataaggctagtccgttatcaacttgaaaaagtggcaccgagtcggtgctttt

SEQ ID NO: 682 - RNA, 100 nt, synthetic construct
  source 1..100: mol_type = other RNA
tagacatctgagggataaaagttttagagctagaaatagcaagttaaaataaggctagtccgttatcaacttgaaaaagtggcaccgagtcggtgctttt

SEQ ID NO: 683 - RNA, 100 nt, synthetic construct
  source 1..100: mol_type = other RNA
catctgagggataaaaaggagttttagagctagaaatagcaagttaaaataaggctagtccgttatcaacttgaaaaagtggcaccgagtcggtgctttt

SEQ ID NO: 684 - RNA, 100 nt, synthetic construct
  source 1..100: mol_type = other RNA
tgcaatcctgcagaagagacgttttagagctagaaatagcaagttaaaataaggctagtccgttatcaacttgaaaaagtggcaccgagtcggtgctttt

SEQ ID NO: 685 - RNA, 100 nt, synthetic construct
  source 1..100: mol_type = other RNA
gtgcggttccagccttcagggttttagagctagaaatagcaagttaaaataaggctagtccgttatcaacttgaaaaagtggcaccgagtcggtgctttt

SEQ ID NO: 686 - RNA, 100 nt, synthetic construct
  source 1..100: mol_type = other RNA
tgcggttccagccttcaggagttttagagctagaaatagcaagttaaaataaggctagtccgttatcaacttgaaaaagtggcaccgagtcggtgctttt

SEQ ID NO: 687 - RNA, 100 nt, synthetic construct
  source 1..100: mol_type = other RNA
gacccaaattttggggtatggttttagagctagaaatagcaagttaaaataaggctagtccgttatcaacttgaaaaagtggcaccgagtcggtgctttt

SEQ ID NO: 688 - RNA, 100 nt, synthetic construct
  source 1..100: mol_type = other RNA
cactccatcggccattcactgttttagagctagaaatagcaagttaaaataaggctagtccgttatcaacttgaaaaagtggcaccgagtcggtgctttt

SEQ ID NO: 689 - RNA, 100 nt, synthetic construct
  source 1..100: mol_type = other RNA
gtggattgctttgagaaggggttttagagctagaaatagcaagttaaaataaggctagtccgttatcaacttgaaaaagtggcaccgagtcggtgctttt

SEQ ID NO: 690 - RNA, 100 nt, synthetic construct
  source 1..100: mol_type = other RNA
ccccagggatcctgctctctgttttagagctagaaatagcaagttaaaataaggctagtccgttatcaacttgaaaaagtggcaccgagtcggtgctttt

SEQ ID NO: 691 - RNA, 100 nt, synthetic construct
  source 1..100: mol_type = other RNA
tcaagaccaaaagactgtcagttttagagctagaaatagcaagttaaaataaggctagtccgttatcaacttgaaaaagtggcaccgagtcggtgctttt

SEQ ID NO: 692 - RNA, 100 nt, synthetic construct
  source 1..100: mol_type = other RNA
gcacctgccaagtgaatggcgttttagagctagaaatagcaagttaaaataaggctagtccgttatcaacttgaaaaagtggcaccgagtcggtgctttt

SEQ ID NO: 693 - RNA, 100 nt, synthetic construct
  source 1..100: mol_type = other RNA
ctgccaagtgaatggccgatgttttagagctagaaatagcaagttaaaataaggctagtccgttatcaacttgaaaaagtggcaccgagtcggtgctttt

SEQ ID NO: 694 - RNA, 100 nt, synthetic construct
  source 1..100: mol_type = other RNA
gaatggccgatggagtgggcgttttagagctagaaatagcaagttaaaataaggctagtccgttatcaacttgaaaaagtggcaccgagtcggtgctttt

SEQ ID NO: 695 - RNA, 100 nt, synthetic construct
  source 1..100: mol_type = other RNA
agtgggcagacagcgatctggttttagagctagaaatagcaagttaaaataaggctagtccgttatcaacttgaaaaagtggcaccgagtcggtgctttt

SEQ ID NO: 696 - RNA, 100 nt, synthetic construct
  source 1..100: mol_type = other RNA
ggcagccagtaccgccttgagttttagagctagaaatagcaagttaaaataaggctagtccgttatcaacttgaaaaagtggcaccgagtcggtgctttt

SEQ ID NO: 697 - RNA, 100 nt, synthetic construct
  source 1..100: mol_type = other RNA
tcccagcggcgaacgtgtcagttttagagctagaaatagcaagttaaaataaggctagtccgttatcaacttgaaaaagtggcaccgagtcggtgctttt

SEQ ID NO: 698 - RNA, 100 nt, synthetic construct
  source 1..100: mol_type = other RNA
gtgtcaggaaggtggctcttgttttagagctagaaatagcaagttaaaataaggctagtccgttatcaacttgaaaaagtggcaccgagtcggtgctttt

SEQ ID NO: 699 - RNA, 100 nt, synthetic construct; identical to SEQ ID NO: 497
  source 1..100: mol_type = other RNA

SEQ ID NO: 700 - RNA, 100 nt, synthetic construct
  source 1..100: mol_type = other RNA
cctccaggcagtgtacagcagttttagagctagaaatagcaagttaaaataaggctagtccgttatcaacttgaaaaagtggcaccgagtcggtgctttt

SEQ ID NO: 701 - RNA, 100 nt, synthetic construct
  source 1..100: mol_type = other RNA
ttctaccaaatgatcggtaggttttagagctagaaatagcaagttaaaataaggctagtccgttatcaacttgaaaaagtggcaccgagtcggtgctttt

SEQ ID NO: 702 - RNA, 100 nt, synthetic construct
  source 1..100: mol_type = other RNA
ctaccaaatgatcggtaggggttttagagctagaaatagcaagttaaaataaggctagtccgttatcaacttgaaaaagtggcaccgagtcggtgctttt

SEQ ID NO: 703 - RNA, 100 nt, synthetic construct
  source 1..100: mol_type = other RNA
caagcaaccatggcaggccagttttagagctagaaatagcaagttaaaataaggctagtccgttatcaacttgaaaaagtggcaccgagtcggtgctttt

SEQ ID NO: 704 - RNA, 100 nt, synthetic construct
  source 1..100: mol_type = other RNA
tatggccagactatcaggtggttttagagctagaaatagcaagttaaaataaggctagtccgttatcaacttgaaaaagtggcaccgagtcggtgctttt

SEQ ID NO: 705 - RNA, 100 nt, synthetic construct
  source 1..100: mol_type = other RNA
cacttgccagcaacaaagtagttttagagctagaaatagcaagttaaaataaggctagtccgttatcaacttgaaaaagtggcaccgagtcggtgctttt

SEQ ID NO: 706 - RNA, 100 nt, synthetic construct
  source 1..100: mol_type = other RNA
gctcaatatgccccaggctagttttagagctagaaatagcaagttaaaataaggctagtccgttatcaacttgaaaaagtggcaccgagtcggtgctttt

SEQ ID NO: 707 - RNA, 100 nt, synthetic construct
  source 1..100: mol_type = other RNA
ctttcaagtgctgccctggcgttttagagctagaaatagcaagttaaaataaggctagtccgttatcaacttgaaaaagtggcaccgagtcggtgctttt

SEQ ID NO: 708 - RNA, 100 nt, synthetic construct
  source 1..100: mol_type = other RNA
ccttcagccagggcagcactgttttagagctagaaatagcaagttaaaataaggctagtccgttatcaacttgaaaaagtggcaccgagtcggtgctttt

SEQ ID NO: 709 - RNA, 100 nt, synthetic construct
  source 1..100: mol_type = other RNA
cagccagggcagcacttgaagttttagagctagaaatagcaagttaaaataaggctagtccgttatcaacttgaaaaagtggcaccgagtcggtgctttt

SEQ ID NO: 710 - RNA, 100 nt, synthetic construct
  source 1..100: mol_type = other RNA
gcctttctgtaggggaggtggttttagagctagaaatagcaagttaaaataaggctagtccgttatcaacttgaaaaagtggcaccgagtcggtgctttt

SEQ ID NO: 711 - RNA, 100 nt, synthetic construct
  source 1..100: mol_type = other RNA
aatgggcctataaaggacaagttttagagctagaaatagcaagttaaaataaggctagtccgttatcaacttgaaaaagtggcaccgagtcggtgctttt

SEQ ID NO: 712 - RNA, 100 nt, synthetic construct
  source 1..100: mol_type = other RNA
tgggcctataaaggacaagggttttagagctagaaatagcaagttaaaataaggctagtccgttatcaacttgaaaaagtggcaccgagtcggtgctttt

SEQ ID NO: 713 - RNA, 100 nt, synthetic construct
  source 1..100: mol_type = other RNA
gtgttcccaaaccatgccacgttttagagctagaaatagcaagttaaaataaggctagtccgttatcaacttgaaaaagtggcaccgagtcggtgctttt

SEQ ID NO: 714 - RNA, 100 nt, synthetic construct
  source 1..100: mol_type = other RNA
gttcccaaaccatgccacaggttttagagctagaaatagcaagttaaaataaggctagtccgttatcaacttgaaaaagtggcaccgagtcggtgctttt

SEQ ID NO: 715 - RNA, 100 nt, synthetic construct
  source 1..100: mol_type = other RNA
gcggttccagccttcaggaggttttagagctagaaatagcaagttaaaataaggctagtccgttatcaacttgaaaaagtggcaccgagtcggtgctttt

SEQ ID NO: 716 - RNA, 100 nt, synthetic construct
  source 1..100: mol_type = other RNA
ttgtggtctgtggagagggagttttagagctagaaatagcaagttaaaataaggctagtccgttatcaacttgaaaaagtggcaccgagtcggtgctttt

SEQ ID NO: 717 - RNA, 100 nt, synthetic construct
  source 1..100: mol_type = other RNA
gagtctgggagagtcagaaagttttagagctagaaatagcaagttaaaataaggctagtccgttatcaacttgaaaaagtggcaccgagtcggtgctttt

SEQ ID NO: 718 - RNA, 100 nt, synthetic construct
  source 1..100: mol_type = other RNA
cgctccaagagccaccttccgttttagagctagaaatagcaagttaaaataaggctagtccgttatcaacttgaaaaagtggcaccgagtcggtgctttt

SEQ ID NO: 719 - RNA, 100 nt, synthetic construct
  source 1..100: mol_type = other RNA
taccccgctgcagaggtatggttttagagctagaaatagcaagttaaaataaggctagtccgttatcaacttgaaaaagtggcaccgagtcggtgctttt

SEQ ID NO: 720 - RNA, 100 nt, synthetic construct
  source 1..100: mol_type = other RNA
gggccagtattccccgttctgttttagagctagaaatagcaagttaaaataaggctagtccgttatcaacttgaaaaagtggcaccgagtcggtgctttt

SEQ ID NO: 721 - RNA, 100 nt, synthetic construct
  source 1..100: mol_type = other RNA
tggattgctttgagaagggggttttagagctagaaatagcaagttaaaataaggctagtccgttatcaacttgaaaaagtggcaccgagtcggtgctttt

SEQ ID NO: 722 - RNA, 100 nt, synthetic construct
  source 1..100: mol_type = other RNA
agggtgctccaggaccccgtgttttagagctagaaatagcaagttaaaataaggctagtccgttatcaacttgaaaaagtggcaccgagtcggtgctttt

SEQ ID NO: 723 - RNA, 100 nt, synthetic construct
  source 1..100: mol_type = other RNA
cacctgaagagaaaggctgagttttagagctagaaatagcaagttaaaataaggctagtccgttatcaacttgaaaaagtggcaccgagtcggtgctttt

SEQ ID NO: 724 - RNA, 100 nt, synthetic construct; identical to SEQ ID NO: 609
  source 1..100: mol_type = other RNA

SEQ ID NO: 725 - RNA, 100 nt, synthetic construct; identical to SEQ ID NO: 508
  source 1..100: mol_type = other RNA

SEQ ID NO: 726 - RNA, 100 nt, synthetic construct; identical to SEQ ID NO: 607
  source 1..100: mol_type = other RNA

SEQ ID NO: 727 - RNA, 100 nt, synthetic construct; identical to SEQ ID NO: 606
  source 1..100: mol_type = other RNA

SEQ ID NO: 728 - RNA, 100 nt, synthetic construct; identical to SEQ ID NO: 605
  source 1..100: mol_type = other RNA

SEQ ID NO: 729 - RNA, 100 nt, synthetic construct; identical to SEQ ID NO: 604
  source 1..100: mol_type = other RNA

SEQ ID NO: 730 - RNA, 100 nt, synthetic construct; identical to SEQ ID NO: 574
  source 1..100: mol_type = other RNA

SEQ ID NO: 731 - RNA, 100 nt, synthetic construct; identical to SEQ ID NO: 573
  source 1..100: mol_type = other RNA

SEQ ID NO: 732 - RNA, 100 nt, synthetic construct; identical to SEQ ID NO: 572
  source 1..100: mol_type = other RNA

SEQ ID NO: 733 - RNA, 100 nt, synthetic construct
  source 1..100: mol_type = other RNA
aacctgcagaggcagtgggggttttagagctagaaatagcaagttaaaataaggctagtccgttatcaacttgaaaaagtggcaccgagtcggtgctttt

SEQ ID NO: 734 - RNA, 100 nt, synthetic construct; identical to SEQ ID NO: 595
  source 1..100: mol_type = other RNA

SEQ ID NO: 735 - RNA, 100 nt, synthetic construct; identical to SEQ ID NO: 593
  source 1..100: mol_type = other RNA

SEQ ID NO: 736 - RNA, 100 nt, synthetic construct; identical to SEQ ID NO: 592
  source 1..100: mol_type = other RNA

SEQ ID NO: 737 - RNA, 100 nt, synthetic construct; identical to SEQ ID NO: 459
  source 1..100: mol_type = other RNA

SEQ ID NO: 738 - RNA, 100 nt, synthetic construct; identical to SEQ ID NO: 590
  source 1..100: mol_type = other RNA

SEQ ID NO: 739 - RNA, 100 nt, synthetic construct; identical to SEQ ID NO: 454
  source 1..100: mol_type = other RNA

SEQ ID NO: 740 - RNA, 100 nt, synthetic construct
  source 1..100: mol_type = other RNA
ccctcgcttacctccagacagttttagagctagaaatagcaagttaaaataaggctagtccgttatcaacttgaaaaagtggcaccgagtcggtgctttt

SEQ ID NO: 741 - RNA, 100 nt, synthetic construct; identical to SEQ ID NO: 609
  source 1..100: mol_type = other RNA

SEQ ID NO: 742 - RNA, 100 nt, synthetic construct
  source 1..100: mol_type = other RNA
ggtcaaaggtcaccttggcagttttagagctagaaatagcaagttaaaataaggctagtccgttatcaacttgaaaaagtggcaccgagtcggtgctttt

SEQ ID NO: 743 - RNA, 100 nt, synthetic construct
  source 1..100: mol_type = other RNA
ttccaccttctcaattaagtgttttagagctagaaatagcaagttaaaataaggctagtccgttatcaacttgaaaaagtggcaccgagtcggtgctttt

SEQ ID NO: 744 - RNA, 100 nt, synthetic construct
  source 1..100: mol_type = other RNA
taacctctgaccttcataatgttttagagctagaaatagcaagttaaaataaggctagtccgttatcaacttgaaaaagtggcaccgagtcggtgctttt

SEQ ID NO: 745 - RNA, 100 nt, synthetic construct; identical to SEQ ID NO: 508
  source 1..100: mol_type = other RNA

SEQ ID NO: 746 - RNA, 100 nt, synthetic construct
  source 1..100: mol_type = other RNA
cttctgaccatcagtcatgagttttagagctagaaatagcaagttaaaataaggctagtccgttatcaacttgaaaaagtggcaccgagtcggtgctttt

SEQ ID NO: 747 - RNA, 100 nt, synthetic construct
  source 1..100: mol_type = other RNA
tcccttctgaccatcagtcagttttagagctagaaatagcaagttaaaataaggctagtccgttatcaacttgaaaaagtggcaccgagtcggtgctttt

SEQ ID NO: 748 - RNA, 100 nt, synthetic construct; identical to SEQ ID NO: 607
  source 1..100: mol_type = other RNA

SEQ ID NO: 749 - RNA, 100 nt, synthetic construct
  source 1..100: mol_type = other RNA
ttctgtgcttacaatgactggttttagagctagaaatagcaagttaaaataaggctagtccgttatcaacttgaaaaagtggcaccgagtcggtgctttt

SEQ ID NO: 750 - RNA, 100 nt, synthetic construct; identical to SEQ ID NO: 606
  source 1..100: mol_type = other RNA

SEQ ID NO: 751 - RNA, 100 nt, synthetic construct; identical to SEQ ID NO: 605
  source 1..100: mol_type = other RNA

SEQ ID NO: 752 - RNA, 100 nt, synthetic construct; identical to SEQ ID NO: 604
  source 1..100: mol_type = other RNA

SEQ ID NO: 753 - RNA, 100 nt, synthetic construct; identical to SEQ ID NO: 603
  source 1..100: mol_type = other RNA

SEQ ID NO: 754 - RNA, 100 nt, synthetic construct; identical to SEQ ID NO: 596
  source 1..100: mol_type = other RNA

SEQ ID NO: 755 - RNA, 100 nt, synthetic construct; identical to SEQ ID NO: 597
  source 1..100: mol_type = other RNA

SEQ ID NO: 756 - RNA, 100 nt, synthetic construct
  source 1..100: mol_type = other RNA
ctggcacccaggggaacaacgttttagagctagaaatagcaagttaaaataaggctagtccgttatcaacttgaaaaagtggcaccgagtcggtgctttt

SEQ ID NO: 757 - RNA, 100 nt, synthetic construct; identical to SEQ ID NO: 496
  source 1..100: mol_type = other RNA

SEQ ID NO: 758 - RNA, 100 nt, synthetic construct; identical to SEQ ID NO: 599
  source 1..100: mol_type = other RNA

SEQ ID NO: 759 - RNA, 100 nt, synthetic construct
  source 1..100: mol_type = other RNA
cctctccacagaccacaagtgttttagagctagaaatagcaagttaaaataaggctagtccgttatcaacttgaaaaagtggcaccgagtcggtgctttt

SEQ ID NO: 760 - RNA, 100 nt, synthetic construct; identical to SEQ ID NO: 499
  source 1..100: mol_type = other RNA

SEQ ID NO: 761 - RNA, 100 nt, synthetic construct; identical to SEQ ID NO: 601
  source 1..100: mol_type = other RNA

SEQ ID NO: 762 - RNA, 100 nt, synthetic construct
  source 1..100: mol_type = other RNA
acttcaggaggggagaagcggttttagagctagaaatagcaagttaaaataaggctagtccgttatcaacttgaaaaagtggcaccgagtcggtgctttt

SEQ ID NO: 763 - RNA, 100 nt, synthetic construct
  source 1..100: mol_type = other RNA
cccctacagaaaggcagctggttttagagctagaaatagcaagttaaaataaggctagtccgttatcaacttgaaaaagtggcaccgagtcggtgctttt

SEQ ID NO: 764 - RNA, 100 nt, synthetic construct
  source 1..100: mol_type = other RNA
cctacagaaaggcagctgtggttttagagctagaaatagcaagttaaaataaggctagtccgttatcaacttgaaaaagtggcaccgagtcggtgctttt

SEQ ID NO: 765 - RNA, 100 nt, synthetic construct; identical to SEQ ID NO: 602
  source 1..100: mol_type = other RNA

SEQ ID NO: 766 - RNA, 100 nt, synthetic construct; identical to SEQ ID NO: 743
  source 1..100: mol_type = other RNA

SEQ ID NO: 767 - RNA, 100 nt, synthetic construct; identical to SEQ ID NO: 746
  source 1..100: mol_type = other RNA

SEQ ID NO: 768 - RNA, 100 nt, synthetic construct; identical to SEQ ID NO: 762
  source 1..100: mol_type = other RNA

SEQ ID NO: 769 - RNA, 100 nt, synthetic construct; identical to SEQ ID NO: 763
  source 1..100: mol_type = other RNA

SEQ ID NO: 770 - RNA, 100 nt, synthetic construct; identical to SEQ ID NO: 764
  source 1..100: mol_type = other RNA

SEQ ID NO: 771 - RNA, 100 nt, synthetic construct; identical to SEQ ID NO: 574
  source 1..100: mol_type = other RNA

SEQ ID NO: 772 - RNA, 100 nt, synthetic construct
  source 1..100: mol_type = other RNA
gccctcaaacctctgcactcgttttagagctagaaatagcaagttaaaataaggctagtccgttatcaacttgaaaaagtggcaccgagtcggtgctttt

SEQ ID NO: 773 - RNA, 100 nt, synthetic construct; identical to SEQ ID NO: 573
  source 1..100: mol_type = other RNA

SEQ ID NO: 774 - RNA, 100 nt, synthetic construct
  source 1..100: mol_type = other RNA
aaaggtcaccttggcaggaagttttagagctagaaatagcaagttaaaataaggctagtccgttatcaacttgaaaaagtggcaccgagtcggtgctttt

SEQ ID NO: 775 - RNA, 100 nt, synthetic construct
  source 1..100: mol_type = other RNA
ctgtcttcaaacctgggccggttttagagctagaaatagcaagttaaaataaggctagtccgttatcaacttgaaaaagtggcaccgagtcggtgctttt

SEQ ID NO: 776 - RNA, 100 nt, synthetic construct; identical to SEQ ID NO: 572
  source 1..100: mol_type = other RNA

SEQ ID NO: 777 - RNA, 100 nt, synthetic construct; identical to SEQ ID NO: 571
  source 1..100: mol_type = other RNA

SEQ ID NO: 778 - RNA, 100 nt, synthetic construct
  source 1..100: mol_type = other RNA
gtatgtcttactttgttgctgttttagagctagaaatagcaagttaaaataaggctagtccgttatcaacttgaaaaagtggcaccgagtcggtgctttt

SEQ ID NO: 779 - RNA, 100 nt, synthetic construct
  source 1..100: mol_type = other RNA
atacctctgcagcggggtacgttttagagctagaaatagcaagttaaaataaggctagtccgttatcaacttgaaaaagtggcaccgagtcggtgctttt

SEQ ID NO: 780 - RNA, 100 nt, synthetic construct
  source 1..100: mol_type = other RNA
gcacccaggggaacaacagagttttagagctagaaatagcaagttaaaataaggctagtccgttatcaacttgaaaaagtggcaccgagtcggtgctttt

SEQ ID NO: 781 - RNA, 100 nt, synthetic construct; identical to SEQ ID NO: 568
  source 1..100: mol_type = other RNA

SEQ ID NO: 782 - RNA, 100 nt, synthetic construct
  source 1..100: mol_type = other RNA
tcctacttcaggaggggagagttttagagctagaaatagcaagttaaaataaggctagtccgttatcaacttgaaaaagtggcaccgagtcggtgctttt

SEQ ID NO: 783 - RNA, 100 nt, synthetic construct; identical to SEQ ID NO: 569
  source 1..100: mol_type = other RNA

SEQ ID NO: 784 - RNA, 100 nt, synthetic construct
  source 1..100: mol_type = other RNA
tattcgtccagaggaagagcgttttagagctagaaatagcaagttaaaataaggctagtccgttatcaacttgaaaaagtggcaccgagtcggtgctttt

SEQ ID NO: 785 - RNA, 100 nt, synthetic construct
  source 1..100: mol_type = other RNA
ccagaggaagagctgctcccgttttagagctagaaatagcaagttaaaataaggctagtccgttatcaacttgaaaaagtggcaccgagtcggtgctttt

SEQ ID NO: 786 - RNA, 100 nt, synthetic construct
  source 1..100: mol_type = other RNA
ctctccttgcaggtgattctgttttagagctagaaatagcaagttaaaataaggctagtccgttatcaacttgaaaaagtggcaccgagtcggtgctttt

SEQ ID NO: 787 - RNA, 100 nt, synthetic construct
  source 1..100: mol_type = other RNA
tccttgcaggtgattctggcgttttagagctagaaatagcaagttaaaataaggctagtccgttatcaacttgaaaaagtggcaccgagtcggtgctttt

SEQ ID NO: 788 - RNA, 100 nt, synthetic construct; identical to SEQ ID NO: 570
  source 1..100: mol_type = other RNA

SEQ ID NO: 789 - RNA, 100 nt, synthetic construct; identical to SEQ ID NO: 772
  source 1..100: mol_type = other RNA

SEQ ID NO: 790 - RNA, 100 nt, synthetic construct; identical to SEQ ID NO: 774
  source 1..100: mol_type = other RNA

SEQ ID NO: 791 - RNA, 100 nt, synthetic construct; identical to SEQ ID NO: 780
  source 1..100: mol_type = other RNA

SEQ ID NO: 792 - RNA, 100 nt, synthetic construct; identical to SEQ ID NO: 785
  source 1..100: mol_type = other RNA

SEQ ID NO: 793 - RNA, 100 nt, synthetic construct; identical to SEQ ID NO: 787
  source 1..100: mol_type = other RNA

SEQ ID NO: 794 - RNA, 100 nt, synthetic construct; identical to SEQ ID NO: 595
  source 1..100: mol_type = other RNA

SEQ ID NO: 795 - RNA, 100 nt, synthetic construct; identical to SEQ ID NO: 594
  source 1..100: mol_type = other RNA

SEQ ID NO: 796 - RNA, 100 nt, synthetic construct; identical to SEQ ID NO: 593
  source 1..100: mol_type = other RNA

SEQ ID NO: 797 - RNA, 100 nt, synthetic construct; identical to SEQ ID NO: 592
  source 1..100: mol_type = other RNA

SEQ ID NO: 798 - RNA, 100 nt, synthetic construct
  source 1..100: mol_type = other RNA
gtatctccctaccgatcattgttttagagctagaaatagcaagttaaaataaggctagtccgttatcaacttgaaaaagtggcaccgagtcggtgctttt

SEQ ID NO: 799 - RNA, 100 nt, synthetic construct; identical to SEQ ID NO: 459
  source 1..100: mol_type = other RNA

SEQ ID NO: 800 - RNA, 100 nt, synthetic construct
  source 1..100: mol_type = other RNA
gacgctctcacctgatagtcgttttagagctagaaatagcaagttaaaataaggctagtccgttatcaacttgaaaaagtggcaccgagtcggtgctttt

SEQ ID NO: 801 - RNA, 100 nt, synthetic construct; identical to SEQ ID NO: 590
  source 1..100: mol_type = other RNA

SEQ ID NO: 802 - RNA, 100 nt, synthetic construct
  source 1..100: mol_type = other RNA
agtatgtcttactttgttgcgttttagagctagaaatagcaagttaaaataaggctagtccgttatcaacttgaaaaagtggcaccgagtcggtgctttt

SEQ ID NO: 803 - RNA, 100 nt, synthetic construct; identical to SEQ ID NO: 454
  source 1..100: mol_type = other RNA

SEQ ID NO: 804 - RNA, 100 nt, synthetic construct; identical to SEQ ID NO: 514
  source 1..100: mol_type = other RNA

SEQ ID NO: 805 - RNA, 100 nt, synthetic construct; identical to SEQ ID NO: 515
  source 1..100: mol_type = other RNA

SEQ ID NO: 806 - RNA, 100 nt, synthetic construct
  source 1..100: mol_type = other RNA
acccaggggaacaacagaaggttttagagctagaaatagcaagttaaaataaggctagtccgttatcaacttgaaaaagtggcaccgagtcggtgctttt

SEQ ID NO: 807 - RNA, 100 nt, synthetic construct; identical to SEQ ID NO: 575
  source 1..100: mol_type = other RNA

SEQ ID NO: 808 - RNA, 100 nt, synthetic construct; identical to SEQ ID NO: 576
  source 1..100: mol_type = other RNA

SEQ ID NO: 809 - RNA, 100 nt, synthetic construct
  source 1..100: mol_type = other RNA
ttctgcaggattgcacaacagttttagagctagaaatagcaagttaaaataaggctagtccgttatcaacttgaaaaagtggcaccgagtcggtgctttt

SEQ ID NO: 810 - RNA, 100 nt, synthetic construct; identical to SEQ ID NO: 577
  source 1..100: mol_type = other RNA

SEQ ID NO: 811 - RNA, 100 nt, synthetic construct; identical to SEQ ID NO: 578
  source 1..100: mol_type = other RNA

SEQ ID NO: 812 - RNA, 100 nt, synthetic construct; identical to SEQ ID NO: 579
  source 1..100: mol_type = other RNA

SEQ ID NO: 813 - RNA, 100 nt, synthetic construct; identical to SEQ ID NO: 449
  source 1..100: mol_type = other RNA

SEQ ID NO: 814 - RNA, 100 nt, synthetic construct; identical to SEQ ID NO: 581
  source 1..100: mol_type = other RNA

SEQ ID NO: 815 - RNA, 100 nt, synthetic construct; identical to SEQ ID NO: 582
  source 1..100: mol_type = other RNA

SEQ ID NO: 816 - RNA, 100 nt, synthetic construct; identical to SEQ ID NO: 583
  source 1..100: mol_type = other RNA

SEQ ID NO: 817 - RNA, 100 nt, synthetic construct; identical to SEQ ID NO: 584
  source 1..100: mol_type = other RNA

SEQ ID NO: 818 - RNA, 100 nt, synthetic construct; identical to SEQ ID NO: 585
  source 1..100: mol_type = other RNA

SEQ ID NO: 819 - RNA, 100 nt, synthetic construct
  source 1..100: mol_type = other RNA
cctctccttgcaggtgattcgttttagagctagaaatagcaagttaaaataaggctagtccgttatcaacttgaaaaagtggcaccgagtcggtgctttt

SEQ ID NO: 820 - RNA, 100 nt, synthetic construct; identical to SEQ ID NO: 586
  source 1..100: mol_type = other RNA

SEQ ID NO: 821 - RNA, 100 nt, synthetic construct; identical to SEQ ID NO: 587
  source 1..100: mol_type = other RNA

SEQ ID NO: 822 - RNA, 100 nt, synthetic construct; identical to SEQ ID NO: 588
  source 1..100: mol_type = other RNA

SEQ ID NO: 823 - RNA, 100 nt, synthetic construct; identical to SEQ ID NO: 514
  source 1..100: mol_type = other RNA

SEQ ID NO: 824 - RNA, 100 nt, synthetic construct; identical to SEQ ID NO: 515
  source 1..100: mol_type = other RNA

SEQ ID NO: 825 - RNA, 100 nt, synthetic construct; identical to SEQ ID NO: 806
  source 1..100: mol_type = other RNA

SEQ ID NO: 826 - RNA, 100 nt, synthetic construct; identical to SEQ ID NO: 809
  source 1..100: mol_type = other RNA

SEQ ID NO: 827 - RNA, 109 nt, synthetic construct; identical to SEQ ID NO: 615
  source 1..109: mol_type = other RNA

SEQ ID NO: 828 - RNA, 109 nt, synthetic construct; identical to SEQ ID NO: 614
  source 1..109: mol_type = other RNA

SEQ ID NO: 829 - RNA, 109 nt, synthetic construct; identical to SEQ ID NO: 613
  source 1..109: mol_type = other RNA

SEQ ID NO: 830 - RNA, 109 nt, synthetic construct
  source 1..109: mol_type = other RNA
gtttctcaccttatccccattgttttagtactctgtaatgaaaattacagaatctactaaaacaaggcaaaatgccgtgtttatctcgtcaacttgttggcgagatttt

SEQ ID NO: 831 - RNA, 109 nt, synthetic construct; identical to SEQ ID NO: 518
  source 1..109: mol_type = other RNA

SEQ ID NO: 832 - RNA, 109 nt, synthetic construct
  source 1..109: mol_type = other RNA
cctcacccacaggtggcaagtgttttagtactctgtaatgaaaattacagaatctactaaaacaaggcaaaatgccgtgtttatctcgtcaacttgttggcgagatttt

SEQ ID NO: 833 - RNA, 109 nt, synthetic construct; identical to SEQ ID NO: 610
  source 1..109: mol_type = other RNA

SEQ ID NO: 834 - RNA, 109 nt, synthetic construct
  source 1..109: mol_type = other RNA
ctccttctctgccagatgaaagttttagtactctgtaatgaaaattacagaatctactaaaacaaggcaaaatgccgtgtttatctcgtcaacttgttggcgagatttt

SEQ ID NO: 835 - RNA, 109 nt, synthetic construct; identical to SEQ ID NO: 502
  source 1..109: mol_type = other RNA

SEQ ID NO: 836 - RNA, 119 nt, synthetic construct
  source 1..119: mol_type = other RNA
gttctgtcttttggtcaggacaaccgtctagctataagtgctgcagggtgtgagaaactcctattgctggacgatgtctcttacgaggcattagcacccctcaaacctctgcactctgc

SEQ ID NO: 837 - RNA, 119 nt, synthetic construct
  source 1..119: mol_type = other RNA
gttctgtcttttggtcaggacaaccgtctagctataagtgctgcagggtgtgagaaactcctattgctggacgatgtctcttacgaggcattagcactgtgcttacaatgactgagatc

SEQ ID NO: 838 - RNA, 119 nt, synthetic construct
  source 1..119: mol_type = other RNA
gttctgtcttttggtcaggacaaccgtctagctataagtgctgcagggtgtgagaaactcctattgctggacgatgtctcttacgaggcattagcaccatccttacctacgctgacctt

SEQ ID NO: 839 - RNA, 119 nt, synthetic construct
  source 1..119: mol_type = other RNA
gttctgtcttttggtcaggacaaccgtctagctataagtgctgcagggtgtgagaaactcctattgctggacgatgtctcttacgaggcattagcactctcacctctgcaagtattggg

SEQ ID NO: 840 - RNA, 119 nt, synthetic construct
  source 1..119: mol_type = other RNA
gttctgtcttttggtcaggacaaccgtctagctataagtgctgcagggtgtgagaaactcctattgctggacgatgtctcttacgaggcattagcacctcttcaggtgtgaccaccact

SEQ ID NO: 841 - RNA, 119 nt, synthetic construct
  source 1..119: mol_type = other RNA
gttctgtcttttggtcaggacaaccgtctagctataagtgctgcagggtgtgagaaactcctattgctggacgatgtctcttacgaggcattagcactcaaagcaatccactgtccaag

SEQ ID NO: 842 - RNA, 119 nt, synthetic construct
  source 1..119: mol_type = other RNA
gttctgtcttttggtcaggacaaccgtctagctataagtgctgcagggtgtgagaaactcctattgctggacgatgtctcttacgaggcattagcactctgccagatgaaagccagtct

SEQ ID NO: 843 - RNA, 119 nt, synthetic construct
  source 1..119: mol_type = other RNA
gttctgtcttttggtcaggacaaccgtctagctataagtgctgcagggtgtgagaaactcctattgctggacgatgtctcttacgaggcattagcactgtccccagcgcccttcaaagg

SEQ ID NO: 844 - RNA, 119 nt, synthetic construct
  source 1..119: mol_type = other RNA
gttctgtcttttggtcaggacaaccgtctagctataagtgctgcagggtgtgagaaactcctattgctggacgatgtctcttacgaggcattagcactcctttataggcccatttgtct

SEQ ID NO: 845 - RNA, 119 nt, synthetic construct
  source 1..119: mol_type = other RNA
gttctgtcttttggtcaggacaaccgtctagctataagtgctgcagggtgtgagaaactcctattgctggacgatgtctcttacgaggcattagcacgtccagaggaagagctgctccc

SEQ ID NO: 846 - RNA, 109 nt, synthetic construct; identical to SEQ ID NO: 615
  source 1..109: mol_type = other RNA

SEQ ID NO: 847 - RNA, 109 nt, synthetic construct; identical to SEQ ID NO: 614
  source 1..109: mol_type = other RNA

SEQ ID NO: 848 - RNA, 109 nt, synthetic construct; identical to SEQ ID NO: 613
  source 1..109: mol_type = other RNA

SEQ ID NO: 849 - RNA, 109 nt, synthetic construct; identical to SEQ ID NO: 518
  source 1..109: mol_type = other RNA

SEQ ID NO: 850 - RNA, 109 nt, synthetic construct; identical to SEQ ID NO: 627
  source 1..109: mol_type = other RNA

SEQ ID NO: 851 - RNA, 109 nt, synthetic construct; identical to SEQ ID NO: 516
  source 1..109: mol_type = other RNA

SEQ ID NO: 852 - RNA, 109 nt, synthetic construct; identical to SEQ ID NO: 522
  source 1..109: mol_type = other RNA

SEQ ID NO: 853 - RNA, 109 nt, synthetic construct; identical to SEQ ID NO: 615
  source 1..109: mol_type = other RNA

SEQ ID NO: 854 - RNA, 109 nt, synthetic construct; identical to SEQ ID NO: 614
  source 1..109: mol_type = other RNA

SEQ ID NO: 855 - RNA, 109 nt, synthetic construct; identical to SEQ ID NO: 634
  source 1..109: mol_type = other RNA

SEQ ID NO: 856 - RNA, 109 nt, synthetic construct; identical to SEQ ID NO: 517
  source 1..109: mol_type = other RNA

SEQ ID NO: 857 - RNA, 109 nt, synthetic construct; identical to SEQ ID NO: 613
  source 1..109: mol_type = other RNA

SEQ ID NO: 858 - RNA, 109 nt, synthetic construct; identical to SEQ ID NO: 621
  source 1..109: mol_type = other RNA

SEQ ID NO: 859 - RNA, 109 nt, synthetic construct; identical to SEQ ID NO: 620
  source 1..109: mol_type = other RNA

SEQ ID NO: 860 - RNA, 109 nt, synthetic construct; identical to SEQ ID NO: 619
  source 1..109: mol_type = other RNA

SEQ ID NO: 861 - RNA, 109 nt, synthetic construct; identical to SEQ ID NO: 830
  source 1..109: mol_type = other RNA

SEQ ID NO: 862 - RNA, 109 nt, synthetic construct; identical to SEQ ID NO: 518
  source 1..109: mol_type = other RNA

SEQ ID NO: 863 - RNA, 109 nt, synthetic construct; identical to SEQ ID NO: 632
  source 1..109: mol_type = other RNA

SEQ ID NO: 864 - RNA, 100 nt, synthetic construct; identical to SEQ ID NO: 723
  source 1..100: mol_type = other RNA

SEQ ID NO: 865 - RNA, 100 nt, synthetic construct; identical to SEQ ID NO: 721
  source 1..100: mol_type = other RNA

SEQ ID NO: 866 - RNA, 100 nt, synthetic construct; identical to SEQ ID NO: 719
  source 1..100: mol_type = other RNA

SEQ ID NO: 867 - RNA, 100 nt, synthetic construct; identical to SEQ ID NO: 717
  source 1..100: mol_type = other RNA

SEQ ID NO: 868 - RNA, 100 nt, synthetic construct; identical to SEQ ID NO: 712
  source 1..100: mol_type = other RNA

SEQ ID NO: 869 - RNA, 100 nt, synthetic construct; identical to SEQ ID NO: 711
  source 1..100: mol_type = other RNA

SEQ ID NO: 870 - RNA, 100 nt, synthetic construct; identical to SEQ ID NO: 710
  source 1..100: mol_type = other RNA

SEQ ID NO: 871 - RNA, 100 nt, synthetic construct; identical to SEQ ID NO: 689
  source 1..100: mol_type = other RNA

SEQ ID NO: 872 - RNA, 100 nt, synthetic construct; identical to SEQ ID NO: 684
  source 1..100: mol_type = other RNA

SEQ ID NO: 873 - RNA, 100 nt, synthetic construct; identical to SEQ ID NO: 683
  source 1..100: mol_type = other RNA

SEQ ID NO: 874 - RNA, 100 nt, synthetic construct; identical to SEQ ID NO: 682
  source 1..100: mol_type = other RNA

SEQ ID NO: 875 - RNA, 100 nt, synthetic construct; identical to SEQ ID NO: 680
  source 1..100: mol_type = other RNA

SEQ ID NO: 876 - RNA, 100 nt, synthetic construct; identical to SEQ ID NO: 679
  source 1..100: mol_type = other RNA

SEQ ID NO: 877 - RNA, 100 nt, synthetic construct; identical to SEQ ID NO: 678
  source 1..100: mol_type = other RNA

SEQ ID NO: 878 - RNA, 100 nt, synthetic construct; identical to SEQ ID NO: 677
  source 1..100: mol_type = other RNA

SEQ ID NO: 879 - RNA, 100 nt, synthetic construct; identical to SEQ ID NO: 609
  source 1..100: mol_type = other RNA

SEQ ID NO: 880 - RNA, 100 nt, synthetic construct; identical to SEQ ID NO: 609
  source 1..100: mol_type = other RNA

SEQ ID NO: 881 - RNA, 100 nt, synthetic construct; identical to SEQ ID NO: 508
  source 1..100: mol_type = other RNA

SEQ ID NO: 882 - RNA, 100 nt, synthetic construct; identical to SEQ ID NO: 508
  source 1..100: mol_type = other RNA

SEQ ID NO: 883 - RNA, 100 nt, synthetic construct; identical to SEQ ID NO: 607
  source 1..100: mol_type = other RNA

SEQ ID NO: 884 - RNA, 100 nt, synthetic construct; identical to SEQ ID NO: 607
  source 1..100: mol_type = other RNA

SEQ ID NO: 885 - RNA, 100 nt, synthetic construct; identical to SEQ ID NO: 606
  source 1..100: mol_type = other RNA

SEQ ID NO: 886 - RNA, 100 nt, synthetic construct; identical to SEQ ID NO: 606
  source 1..100: mol_type = other RNA

SEQ ID NO: 887 - RNA, 100 nt, synthetic construct; identical to SEQ ID NO: 605
  source 1..100: mol_type = other RNA

SEQ ID NO: 888 - RNA, 100 nt, synthetic construct; identical to SEQ ID NO: 605
  source 1..100: mol_type = other RNA

SEQ ID NO: 889 - RNA, 100 nt, synthetic construct; identical to SEQ ID NO: 604
  source 1..100: mol_type = other RNA

SEQ ID NO: 890 - RNA, 100 nt, synthetic construct; identical to SEQ ID NO: 604
  source 1..100: mol_type = other RNA

SEQ ID NO: 891 - RNA, 100 nt, synthetic construct; identical to SEQ ID NO: 603
  source 1..100: mol_type = other RNA

SEQ ID NO: 892 - RNA, 100 nt, synthetic construct; identical to SEQ ID NO: 603
  source 1..100: mol_type = other RNA

SEQ ID NO: 893 - RNA, 100 nt, synthetic construct; identical to SEQ ID NO: 596
  source 1..100: mol_type = other RNA

SEQ ID NO: 894 - RNA, 100 nt, synthetic construct; identical to SEQ ID NO: 596
  source 1..100: mol_type = other RNA

SEQ ID NO: 895 - RNA, 100 nt, synthetic construct; identical to SEQ ID NO: 597
  source 1..100: mol_type = other RNA

SEQ ID NO: 896 - RNA, 100 nt, synthetic construct; identical to SEQ ID NO: 597
  source 1..100: mol_type = other RNA

SEQ ID NO: 897 - RNA, 100 nt, synthetic construct; identical to SEQ ID NO: 496
  source 1..100: mol_type = other RNA

SEQ ID NO: 898 - RNA, 100 nt, synthetic construct; identical to SEQ ID NO: 496
  source 1..100: mol_type = other RNA

SEQ ID NO: 899 - RNA, 100 nt, synthetic construct; identical to SEQ ID NO: 599
  source 1..100: mol_type = other RNA

SEQ ID NO: 900 - RNA, 100 nt, synthetic construct; identical to SEQ ID NO: 599
  source 1..100: mol_type = other RNA

SEQ ID NO: 901 - RNA, 100 nt, synthetic construct; identical to SEQ ID NO: 499
  source 1..100: mol_type = other RNA

SEQ ID NO: 902 - RNA, 100 nt, synthetic construct; identical to SEQ ID NO: 499
  source 1..100: mol_type = other RNA

SEQ ID NO: 903 - RNA, 100 nt, synthetic construct; identical to SEQ ID NO: 601
  source 1..100: mol_type = other RNA

SEQ ID NO: 904 - RNA, 100 nt, synthetic construct; identical to SEQ ID NO: 601
  source 1..100: mol_type = other RNA

SEQ ID NO: 905 - RNA, 100 nt, synthetic construct; identical to SEQ ID NO: 602
  source 1..100: mol_type = other RNA

SEQ ID NO: 906 - RNA, 100 nt, synthetic construct; identical to SEQ ID NO: 602
  source 1..100: mol_type = other RNA

SEQ ID NO: 907 - RNA, 100 nt, synthetic construct; identical to SEQ ID NO: 574
  source 1..100: mol_type = other RNA

SEQ ID NO: 908 - RNA, 100 nt, synthetic construct; identical to SEQ ID NO: 574
  source 1..100: mol_type = other RNA

SEQ ID NO: 909 - RNA, 100 nt, synthetic construct; identical to SEQ ID NO: 573
  source 1..100: mol_type = other RNA

SEQ ID NO: 910 - RNA, 100 nt, synthetic construct; identical to SEQ ID NO: 573
  source 1..100: mol_type = other RNA

SEQ ID NO: 911 - RNA, 100 nt, synthetic construct; identical to SEQ ID NO: 572
  source 1..100: mol_type = other RNA

SEQ ID NO: 912 - RNA, 100 nt, synthetic construct; identical to SEQ ID NO: 572
  source 1..100: mol_type = other RNA

SEQ ID NO: 913 - RNA, 100 nt, synthetic construct; identical to SEQ ID NO: 571
  source 1..100: mol_type = other RNA

SEQ ID NO: 914 - RNA, 100 nt, synthetic construct; identical to SEQ ID NO: 571
  source 1..100: mol_type = other RNA

SEQ ID NO: 915 - RNA, 100 nt, synthetic construct; identical to SEQ ID NO: 568
  source 1..100: mol_type = other RNA

SEQ ID NO: 916 - RNA, 100 nt, synthetic construct; identical to SEQ ID NO: 568
  source 1..100: mol_type = other RNA

SEQ ID NO: 917 - RNA, 100 nt, synthetic construct; identical to SEQ ID NO: 569
  source 1..100: mol_type = other RNA

SEQ ID NO: 918 - RNA, 100 nt, synthetic construct; identical to SEQ ID NO: 569
  source 1..100: mol_type = other RNA

SEQ ID NO: 919 - RNA, 100 nt, synthetic construct; identical to SEQ ID NO: 570
  source 1..100: mol_type = other RNA

SEQ ID NO: 920 - RNA, 100 nt, synthetic construct; identical to SEQ ID NO: 570
  source 1..100: mol_type = other RNA

SEQ ID NO: 921 - RNA, 100 nt, synthetic construct; identical to SEQ ID NO: 595
  source 1..100: mol_type = other RNA

SEQ ID NO: 922 - RNA, 100 nt, synthetic construct; identical to SEQ ID NO: 595
  source 1..100: mol_type = other RNA

SEQ ID NO: 923 - RNA, 100 nt, synthetic construct; identical to SEQ ID NO: 594
  source 1..100: mol_type = other RNA

SEQ ID NO: 924 - RNA, 100 nt, synthetic construct; identical to SEQ ID NO: 594
  source 1..100: mol_type = other RNA

SEQ ID NO: 925 - RNA, 100 nt, synthetic construct; identical to SEQ ID NO: 593
  source 1..100: mol_type = other RNA

SEQ ID NO: 926 - RNA, 100 nt, synthetic construct; identical to SEQ ID NO: 593
  source 1..100: mol_type = other RNA

SEQ ID NO: 927 - RNA, 100 nt, synthetic construct; identical to SEQ ID NO: 592
  source 1..100: mol_type = other RNA

SEQ ID NO: 928 - RNA, 100 nt, synthetic construct; identical to SEQ ID NO: 592
  source 1..100: mol_type = other RNA

SEQ ID NO: 929 - RNA, 100 nt, synthetic construct; identical to SEQ ID NO: 459
  source 1..100: mol_type = other RNA

SEQ ID NO: 930 - RNA, 100 nt, synthetic construct; identical to SEQ ID NO: 459
  source 1..100: mol_type = other RNA

SEQ ID NO: 931 - RNA, 100 nt, synthetic construct; identical to SEQ ID NO: 590
  source 1..100: mol_type = other RNA

SEQ ID NO: 932 - RNA, 100 nt, synthetic construct; identical to SEQ ID NO: 590
  source 1..100: mol_type = other RNA

SEQ ID NO: 933 - RNA, 100 nt, synthetic construct; identical to SEQ ID NO: 454
  source 1..100: mol_type = other RNA

SEQ ID NO: 934 - RNA, 100 nt, synthetic construct; identical to SEQ ID NO: 454
  source 1..100: mol_type = other RNA

SEQ ID NO: 935 - RNA, 100 nt, synthetic construct; identical to SEQ ID NO: 575
  source 1..100: mol_type = other RNA

SEQ ID NO: 936 - RNA, 100 nt, synthetic construct; identical to SEQ ID NO: 575
  source 1..100: mol_type = other RNA

SEQ ID NO: 937 - RNA, 100 nt, synthetic construct; identical to SEQ ID NO: 576
  source 1..100: mol_type = other RNA

SEQ ID NO: 938 - RNA, 100 nt, synthetic construct; identical to SEQ ID NO: 576
  source 1..100: mol_type = other RNA

SEQ ID NO: 939 - RNA, 100 nt, synthetic construct; identical to SEQ ID NO: 577
  source 1..100: mol_type = other RNA

SEQ ID NO: 940 - RNA, 100 nt, synthetic construct; identical to SEQ ID NO: 577
  source 1..100: mol_type = other RNA

SEQ ID NO: 941 - RNA, 100 nt, synthetic construct; identical to SEQ ID NO: 578
  source 1..100: mol_type = other RNA

SEQ ID NO: 942 - RNA, 100 nt, synthetic construct; identical to SEQ ID NO: 578
  source 1..100: mol_type = other RNA

SEQ ID NO: 943 - RNA, 100 nt, synthetic construct; identical to SEQ ID NO: 579
  source 1..100: mol_type = other RNA

SEQ ID NO: 944 - RNA, 100 nt, synthetic construct; identical to SEQ ID NO: 579
  source 1..100: mol_type = other RNA

SEQ ID NO: 945 - RNA, 100 nt, synthetic construct; identical to SEQ ID NO: 449
  source 1..100: mol_type = other RNA

SEQ ID NO: 946 - RNA, 100 nt, synthetic construct; identical to SEQ ID NO: 449
  source 1..100: mol_type = other RNA

SEQ ID NO: 947 - RNA, 100 nt, synthetic construct; identical to SEQ ID NO: 581
  source 1..100: mol_type = other RNA

SEQ ID NO: 948 - RNA, 100 nt, synthetic construct; identical to SEQ ID NO: 581
  source 1..100: mol_type = other RNA

SEQ ID NO: 949 - RNA, 100 nt, synthetic construct; identical to SEQ ID NO: 582
  source 1..100: mol_type = other RNA

SEQ ID NO: 950 - RNA, 100 nt, synthetic construct; identical to SEQ ID NO: 582
  source 1..100: mol_type = other RNA

SEQ ID NO: 951 - RNA, 100 nt, synthetic construct; identical to SEQ ID NO: 583
  source 1..100: mol_type = other RNA

SEQ ID NO: 952 - RNA, 100 nt, synthetic construct; identical to SEQ ID NO: 583
  source 1..100: mol_type = other RNA

SEQ ID NO: 953 - RNA, 100 nt, synthetic construct; identical to SEQ ID NO: 584
  source 1..100: mol_type = other RNA

SEQ ID NO: 954 - RNA, 100 nt, synthetic construct; identical to SEQ ID NO: 584
  source 1..100: mol_type = other RNA

SEQ ID NO: 955 - RNA, 100 nt, synthetic construct; identical to SEQ ID NO: 585
  source 1..100: mol_type = other RNA

SEQ ID NO: 956 - RNA, 100 nt, synthetic construct; identical to SEQ ID NO: 585
  source 1..100: mol_type = other RNA

SEQ ID NO: 957 - RNA, 100 nt, synthetic construct; identical to SEQ ID NO: 586
  source 1..100: mol_type = other RNA

SEQ ID NO: 958 - RNA, 100 nt, synthetic construct; identical to SEQ ID NO: 586
  source 1..100: mol_type = other RNA

SEQ ID NO: 959 - RNA, 100 nt, synthetic construct; identical to SEQ ID NO: 587
  source 1..100: mol_type = other RNA

SEQ ID NO: 960 - RNA, 100 nt, synthetic construct; identical to SEQ ID NO: 587
  source 1..100: mol_type = other RNA

SEQ ID NO: 961 - RNA, 100 nt, synthetic construct; identical to SEQ ID NO: 588
  source 1..100: mol_type = other RNA

SEQ ID NO: 962 - RNA, 100 nt, synthetic construct; identical to SEQ ID NO: 588
  source 1..100: mol_type = other RNA

SEQ ID NO: 963 - RNA, 109 nt, synthetic construct; identical to SEQ ID NO: 615
  source 1..109: mol_type = other RNA

SEQ ID NO: 964 - RNA, 109 nt, synthetic construct; identical to SEQ ID NO: 615
  source 1..109: mol_type = other RNA

SEQ ID NO: 965 - RNA, 109 nt, synthetic construct; identical to SEQ ID NO: 614
  source 1..109: mol_type = other RNA

SEQ ID NO: 966 - RNA, 109 nt, synthetic construct; identical to SEQ ID NO: 614
  source 1..109: mol_type = other RNA

SEQ ID NO: 967 - RNA, 109 nt, synthetic construct; identical to SEQ ID NO: 613
  source 1..109: mol_type = other RNA

SEQ ID NO: 968 - RNA, 109 nt, synthetic construct; identical to SEQ ID NO: 613
  source 1..109: mol_type = other RNA

SEQ ID NO: 969 - RNA, 109 nt, synthetic construct; identical to SEQ ID NO: 518
  source 1..109: mol_type = other RNA

SEQ ID NO: 970 - RNA, 109 nt, synthetic construct; identical to SEQ ID NO: 518
  source 1..109: mol_type = other RNA

SEQ ID NO: 971 - RNA, 109 nt, synthetic construct; identical to SEQ ID NO: 610
  source 1..109: mol_type = other RNA

SEQ ID NO: 972 - RNA, 109 nt, synthetic construct; identical to SEQ ID NO: 610
  source 1..109: mol_type = other RNA

SEQ ID NO: 973 - RNA, 109 nt, synthetic construct; identical to SEQ ID NO: 502
  source 1..109: mol_type = other RNA

SEQ ID NO: 974 - RNA, 109 nt, synthetic construct; identical to SEQ ID NO: 502
  source 1..109: mol_type = other RNA

SEQ ID NO: 975 - RNA, 109 nt, synthetic construct; identical to SEQ ID NO: 627
  source 1..109: mol_type = other RNA

SEQ ID NO: 976 - RNA, 109 nt, synthetic construct; identical to SEQ ID NO: 627
  source 1..109: mol_type = other RNA

SEQ ID NO: 977 - RNA, 109 nt, synthetic construct; identical to SEQ ID NO: 626
  source 1..109: mol_type = other RNA

SEQ ID NO: 978 - RNA, 109 nt, synthetic construct; identical to SEQ ID NO: 626
  source 1..109: mol_type = other RNA

SEQ ID NO: 979 - RNA, 109 nt, synthetic construct; identical to SEQ ID NO: 625
  source 1..109: mol_type = other RNA

SEQ ID NO: 980 - RNA, 109 nt, synthetic construct; identical to SEQ ID NO: 625
  source 1..109: mol_type = other RNA

SEQ ID NO: 981 - RNA, 109 nt, synthetic construct; identical to SEQ ID NO: 522
  source 1..109: mol_type = other RNA

SEQ ID NO: 982 - RNA, 109 nt, synthetic construct; identical to SEQ ID NO: 522
  source 1..109: mol_type = other RNA

SEQ ID NO: 983 - RNA, 109 nt, synthetic construct; identical to SEQ ID NO: 623
  source 1..109: mol_type = other RNA

SEQ ID NO: 984 - RNA, 109 nt, synthetic construct; identical to SEQ ID NO: 623
  source 1..109: mol_type = other RNA

SEQ ID NO: 985 - RNA, 109 nt, synthetic construct; identical to SEQ ID NO: 622
  source 1..109: mol_type = other RNA

SEQ ID NO: 986 - RNA, 109 nt, synthetic construct; identical to SEQ ID NO: 622
  source 1..109: mol_type = other RNA

SEQ ID NO: 987 - RNA, 109 nt, synthetic construct; identical to SEQ ID NO: 621
  source 1..109: mol_type = other RNA

SEQ ID NO: 988 - RNA, 109 nt, synthetic construct; identical to SEQ ID NO: 621
  source 1..109: mol_type = other RNA

SEQ ID NO: 989 - RNA, 109 nt, synthetic construct; identical to SEQ ID NO: 620
  source 1..109: mol_type = other RNA

SEQ ID NO: 990 - RNA, 109 nt, synthetic construct; identical to SEQ ID NO: 620
  source 1..109: mol_type = other RNA

SEQ ID NO: 991 - RNA, 109 nt, synthetic construct; identical to SEQ ID NO: 619
  source 1..109: mol_type = other RNA

SEQ ID NO: 992 - RNA, 109 nt, synthetic construct; identical to SEQ ID NO: 619
  source 1..109: mol_type = other RNA

SEQ ID NO: 993 - RNA, 109 nt, synthetic construct; identical to SEQ ID NO: 616
  source 1..109: mol_type = other RNA

SEQ ID NO: 994 - RNA, 109 nt, synthetic construct; identical to SEQ ID NO: 616
  source 1..109: mol_type = other RNA

SEQ ID NO: 995 - RNA, 109 nt, synthetic construct; identical to SEQ ID NO: 617
  source 1..109: mol_type = other RNA

SEQ ID NO: 996 - RNA, 109 nt, synthetic construct; identical to SEQ ID NO: 617
  source 1..109: mol_type = other RNA

SEQ ID NO: 997 - RNA, 109 nt, synthetic construct; identical to SEQ ID NO: 618
  source 1..109: mol_type = other RNA

SEQ ID NO: 998 - RNA, 109 nt, synthetic construct; identical to SEQ ID NO: 618
  source 1..109: mol_type = other RNA

SEQ ID NO: 999 - RNA, 109 nt, synthetic construct; identical to SEQ ID NO: 516
  source 1..109: mol_type = other RNA

SEQ ID NO: 1000 - RNA, 109 nt, synthetic construct; identical to SEQ ID NO: 516
  source 1..109: mol_type = other RNA

SEQ ID NO: 1001 - RNA, 109 nt, synthetic construct; identical to SEQ ID NO: 634
  source 1..109: mol_type = other RNA

SEQ ID NO: 1002 - RNA, 109 nt, synthetic construct; identical to SEQ ID NO: 634
  source 1..109: mol_type = other RNA

SEQ ID NO: 1003 - RNA, 109 nt, synthetic construct; identical to SEQ ID NO: 517
  source 1..109: mol_type = other RNA

SEQ ID NO: 1004 - RNA, 109 nt, synthetic construct; identical to SEQ ID NO: 517
  source 1..109: mol_type = other RNA

SEQ ID NO: 1005 - RNA, 109 nt, synthetic construct; identical to SEQ ID NO: 632
  source 1..109: mol_type = other RNA

SEQ ID NO: 1006 - RNA, 109 nt, synthetic construct; identical to SEQ ID NO: 632
  source 1..109: mol_type = other RNA

SEQ ID NO: 1007 - RNA, 109 nt, synthetic construct; identical to SEQ ID NO: 659
  source 1..109: mol_type = other RNA

SEQ ID NO: 1008 - RNA, 109 nt, synthetic construct; identical to SEQ ID NO: 659
  source 1..109: mol_type = other RNA

SEQ ID NO: 1009 - RNA, 109 nt, synthetic construct; identical to SEQ ID NO: 658
  source 1..109: mol_type = other RNA

SEQ ID NO: 1010 - RNA, 109 nt, synthetic construct; identical to SEQ ID NO: 658
  source 1..109: mol_type = other RNA

SEQ ID NO: 1011 - RNA, 109 nt, synthetic construct; identical to SEQ ID NO: 655
  source 1..109: mol_type = other RNA

SEQ ID NO: 1012 - RNA, 109 nt, synthetic construct; identical to SEQ ID NO: 655
  source 1..109: mol_type = other RNA

SEQ ID NO: 1013 - RNA, 109 nt, synthetic construct; identical to SEQ ID NO: 652
  source 1..109: mol_type = other RNA

SEQ ID NO: 1014 - RNA, 109 nt, synthetic construct; identical to SEQ ID NO: 652
  source 1..109: mol_type = other RNA

SEQ ID NO: 1015 - RNA, 109 nt, synthetic construct; identical to SEQ ID NO: 651
  source 1..109: mol_type = other RNA

SEQ ID NO: 1016 - RNA, 109 nt, synthetic construct; identical to SEQ ID NO: 651
  source 1..109: mol_type = other RNA

SEQ ID NO: 1017 - RNA, 109 nt, synthetic construct; identical to SEQ ID NO: 650
  source 1..109: mol_type = other RNA

SEQ ID NO: 1018 - RNA, 109 nt, synthetic construct; identical to SEQ ID NO: 650
  source 1..109: mol_type = other RNA

SEQ ID NO: 1019 - RNA, 109 nt, synthetic construct; identical to SEQ ID NO: 647
  source 1..109: mol_type = other RNA

SEQ ID NO: 1020 - RNA, 109 nt, synthetic construct; identical to SEQ ID NO: 647
  source 1..109: mol_type = other RNA

SEQ ID NO: 1021 - RNA, 109 nt, synthetic construct; identical to SEQ ID NO: 646
  source 1..109: mol_type = other RNA

SEQ ID NO: 1022 - RNA, 109 nt, synthetic construct; identical to SEQ ID NO: 646
  source 1..109: mol_type = other RNA

SEQ ID NO: 1023 - RNA, 109 nt, synthetic construct; identical to SEQ ID NO: 645
  source 1..109: mol_type = other RNA

SEQ ID NO: 1024 - RNA, 109 nt, synthetic construct; identical to SEQ ID NO: 645
  source 1..109: mol_type = other RNA

SEQ ID NO: 1025 - RNA, 100 nt, synthetic construct
  source 1..100: mol_type = other RNA
actccatcggccattcacttgttttagagctagaaatagcaagttaaaataaggctagtccgttatcaacttgaaaaagtggcaccgagtcggtgctttt

SEQ ID NO: 1026 - RNA, 100 nt, synthetic construct
  source 1..100: mol_type = other RNA
acccaaattttggggtatgtgttttagagctagaaatagcaagttaaaataaggctagtccgttatcaacttgaaaaagtggcaccgagtcggtgctttt

SEQ ID NO: 1027 - RNA, 100 nt, synthetic construct
  source 1..100: mol_type = other RNA
cgtgacccagtctgcattacgttttagagctagaaatagcaagttaaaataaggctagtccgttatcaacttgaaaaagtggcaccgagtcggtgctttt

SEQ ID NO: 1028 - RNA, 100 nt, synthetic construct
  source 1..100: mol_type = other RNA
gaccaaaagactgtcaggaagttttagagctagaaatagcaagttaaaataaggctagtccgttatcaacttgaaaaagtggcaccgagtcggtgctttt

SEQ ID NO: 1029 - RNA, 100 nt, synthetic construct
  source 1..100: mol_type = other RNA
ggccgatggagtgggcagacgttttagagctagaaatagcaagttaaaataaggctagtccgttatcaacttgaaaaagtggcaccgagtcggtgctttt

SEQ ID NO: 1030 - RNA, 100 nt, synthetic construct
  source 1..100: mol_type = other RNA
acccctcaagaggtggccgagttttagagctagaaatagcaagttaaaataaggctagtccgttatcaacttgaaaaagtggcaccgagtcggtgctttt

SEQ ID NO: 1031 - RNA, 100 nt, synthetic construct
  source 1..100: mol_type = other RNA
aggccctccaggcagtgtacgttttagagctagaaatagcaagttaaaataaggctagtccgttatcaacttgaaaaagtggcaccgagtcggtgctttt

SEQ ID NO: 1032 - RNA, 100 nt, synthetic construct
  source 1..100: mol_type = other RNA
tggccagactatcaggtgaggttttagagctagaaatagcaagttaaaataaggctagtccgttatcaacttgaaaaagtggcaccgagtcggtgctttt

SEQ ID NO: 1033 - RNA, 100 nt, synthetic construct
  source 1..100: mol_type = other RNA
caacaaagtaagacatacttgttttagagctagaaatagcaagttaaaataaggctagtccgttatcaacttgaaaaagtggcaccgagtcggtgctttt

SEQ ID NO: 1034 - RNA, 100 nt, synthetic construct
  source 1..100: mol_type = other RNA
caaaagcaggtacctgctcagttttagagctagaaatagcaagttaaaataaggctagtccgttatcaacttgaaaaagtggcaccgagtcggtgctttt

SEQ ID NO: 1035 - RNA, 100 nt, synthetic construct
  source 1..100: mol_type = other RNA
cctctttcaagtgctgccctgttttagagctagaaatagcaagttaaaataaggctagtccgttatcaacttgaaaaagtggcaccgagtcggtgctttt

SEQ ID NO: 1036 - RNA, 109 nt, synthetic construct
  source 1..109: mol_type = other RNA
gagaaactccaagatgaggatgttttagtactctgtaatgaaaattacagaatctactaaaacaaggcaaaatgccgtgtttatctcgtcaacttgttggcgagatttt

SEQ ID NO: 1037 - RNA, 109 nt, synthetic construct
  source 1..109: mol_type = other RNA
ctgccatggttgcttgtggtagttttagtactctgtaatgaaaattacagaatctactaaaacaaggcaaaatgccgtgtttatctcgtcaacttgttggcgagatttt

SEQ ID NO: 1038 - RNA, 109 nt, synthetic construct; identical to SEQ ID NO: 628
  source 1..109: mol_type = other RNA

SEQ ID NO: 1039 - RNA, 109 nt, synthetic construct
  source 1..109: mol_type = other RNA
accctgtgcagacacgtacctgttttagtactctgtaatgaaaattacagaatctactaaaacaaggcaaaatgccgtgtttatctcgtcaacttgttggcgagatttt

SEQ ID NO: 1040 - RNA, 109 nt, synthetic construct; identical to SEQ ID NO: 629
  source 1..109: mol_type = other RNA

SEQ ID NO: 1041 - RNA, 109 nt, synthetic construct; identical to SEQ ID NO: 630
  source 1..109: mol_type = other RNA

SEQ ID NO: 1042 - RNA, 109 nt, synthetic construct
  source 1..109: mol_type = other RNA
agacaatgagcaacatgtgttgttttagtactctgtaatgaaaattacagaatctactaaaacaaggcaaaatgccgtgtttatctcgtcaacttgttggcgagatttt

SEQ ID NO: 1043 - RNA, 109 nt, synthetic construct; identical to SEQ ID NO: 631
  source 1..109: mol_type = other RNA

SEQ ID NO: 1044 - RNA, 109 nt, synthetic construct
  source 1..109: mol_type = other RNA
ccacaagcaaccatggcaggcgttttagtactctgtaatgaaaattacagaatctactaaaacaaggcaaaatgccgtgtttatctcgtcaacttgttggcgagatttt

SEQ ID NO: 1045 - RNA, 109 nt, synthetic construct
  source 1..109: mol_type = other RNA
caaaaaccagaagcggcaaaagttttagtactctgtaatgaaaattacagaatctactaaaacaaggcaaaatgccgtgtttatctcgtcaacttgttggcgagatttt

SEQ ID NO: 1046 - RNA, 109 nt, synthetic construct; identical to SEQ ID NO: 1036
  source 1..109: mol_type = other RNA

SEQ ID NO: 1047 - RNA, 100 nt, synthetic construct; identical to SEQ ID NO: 722
  source 1..100: mol_type = other RNA

SEQ ID NO: 1048 - RNA, 100 nt, synthetic construct; identical to SEQ ID NO: 720
  source 1..100: mol_type = other RNA

SEQ ID NO: 1049 - RNA, 100 nt, synthetic construct; identical to SEQ ID NO: 718
  source 1..100: mol_type = other RNA

SEQ ID NO: 1050 - RNA, 100 nt, synthetic construct; identical to SEQ ID NO: 715
  source 1..100: mol_type = other RNA

SEQ ID NO: 1051 - RNA, 100 nt, synthetic construct; identical to SEQ ID NO: 714
  source 1..100: mol_type = other RNA

SEQ ID NO: 1052 - RNA, 100 nt, synthetic construct; identical to SEQ ID NO: 713
  source 1..100: mol_type = other RNA

SEQ ID NO: 1053 - RNA, 100 nt, synthetic construct; identical to SEQ ID NO: 709
  source 1..100: mol_type = other RNA

SEQ ID NO: 1054 - RNA, 100 nt, synthetic construct; identical to SEQ ID NO: 708
  source 1..100: mol_type = other RNA

SEQ ID NO: 1055 - RNA, 100 nt, synthetic construct; identical to SEQ ID NO: 690
  source 1..100: mol_type = other RNA

SEQ ID NO: 1056 - RNA, 100 nt, synthetic construct; identical to SEQ ID NO: 691
  source 1..100: mol_type = other RNA

SEQ ID NO: 1057 - RNA, 100 nt, synthetic construct; identical to SEQ ID NO: 692
  source 1..100: mol_type = other RNA

SEQ ID NO: 1058 - RNA, 100 nt, synthetic construct; identical to SEQ ID NO: 693
  source 1..100: mol_type = other RNA

SEQ ID NO: 1059 - RNA, 100 nt, synthetic construct; identical to SEQ ID NO: 694
  source 1..100: mol_type = other RNA

SEQ ID NO: 1060 - RNA, 100 nt, synthetic construct; identical to SEQ ID NO: 695
  source 1..100: mol_type = other RNA

SEQ ID NO: 1061 - RNA, 100 nt, synthetic construct; identical to SEQ ID NO: 696
  source 1..100: mol_type = other RNA

SEQ ID NO: 1062 - RNA, 100 nt, synthetic construct; identical to SEQ ID NO: 697
  source 1..100: mol_type = other RNA

SEQ ID NO: 1063 - RNA, 100 nt, synthetic construct; identical to SEQ ID NO: 698
  source 1..100: mol_type = other RNA

SEQ ID NO: 1064 - RNA, 100 nt, synthetic construct; identical to SEQ ID NO: 497
  source 1..100: mol_type = other RNA

SEQ ID NO: 1065 - RNA, 100 nt, synthetic construct; identical to SEQ ID NO: 700
  source 1..100: mol_type = other RNA

SEQ ID NO: 1066 - RNA, 100 nt, synthetic construct; identical to SEQ ID NO: 701
  source 1..100: mol_type = other RNA

SEQ ID NO: 1067 - RNA, 100 nt, synthetic construct; identical to SEQ ID NO: 702
  source 1..100: mol_type = other RNA

SEQ ID NO: 1068 - RNA, 100 nt, synthetic construct; identical to SEQ ID NO: 703
  source 1..100: mol_type = other RNA

SEQ ID NO: 1069 - RNA, 100 nt, synthetic construct; identical to SEQ ID NO: 704
  source 1..100: mol_type = other RNA

SEQ ID NO: 1070 - RNA, 100 nt, synthetic construct; identical to SEQ ID NO: 705
  source 1..100: mol_type = other RNA

SEQ ID NO: 1071 - RNA, 100 nt, synthetic construct; identical to SEQ ID NO: 706
  source 1..100: mol_type = other RNA

SEQ ID NO: 1072 - RNA, 100 nt, synthetic construct; identical to SEQ ID NO: 707
  source 1..100: mol_type = other RNA

SEQ ID NO: 1073 - RNA, 100 nt, synthetic construct; identical to SEQ ID NO: 688
  source 1..100: mol_type = other RNA

SEQ ID NO: 1074 - RNA, 100 nt, synthetic construct; identical to SEQ ID NO: 687
  source 1..100: mol_type = other RNA

SEQ ID NO: 1075 - RNA, 100 nt, synthetic construct; identical to SEQ ID NO: 686
  source 1..100: mol_type = other RNA

SEQ ID NO: 1076 - RNA, 100 nt, synthetic construct; identical to SEQ ID NO: 685
  source 1..100: mol_type = other RNA

SEQ ID NO: 1077 - RNA, 100 nt, synthetic construct; identical to SEQ ID NO: 681
  source 1..100: mol_type = other RNA

SEQ ID NO: 1078 - RNA, 100 nt, synthetic construct; identical to SEQ ID NO: 660
  source 1..100: mol_type = other RNA

SEQ ID NO: 1079 - RNA, 100 nt, synthetic construct; identical to SEQ ID NO: 661
  source 1..100: mol_type = other RNA

SEQ ID NO: 1080 - RNA, 100 nt, synthetic construct; identical to SEQ ID NO: 662
  source 1..100: mol_type = other RNA

SEQ ID NO: 1081 - RNA, 100 nt, synthetic construct; identical to SEQ ID NO: 663
  source 1..100: mol_type = other RNA

SEQ ID NO: 1082 - RNA, 100 nt, synthetic construct; identical to SEQ ID NO: 664
  source 1..100: mol_type = other RNA

SEQ ID NO: 1083 - RNA, 100 nt, synthetic construct; identical to SEQ ID NO: 665
  source 1..100: mol_type = other RNA

SEQ ID NO: 1084 - RNA, 100 nt, synthetic construct; identical to SEQ ID NO: 666
  source 1..100: mol_type = other RNA

SEQ ID NO: 1085 - RNA, 100 nt, synthetic construct; identical to SEQ ID NO: 667
  source 1..100: mol_type = other RNA

SEQ ID NO: 1086 - RNA, 100 nt, synthetic construct; identical to SEQ ID NO: 668
  source 1..100: mol_type = other RNA

SEQ ID NO: 1087 - RNA, 100 nt, synthetic construct; identical to SEQ ID NO: 669
  source 1..100: mol_type = other RNA

SEQ ID NO: 1088 - RNA, 100 nt, synthetic construct; identical to SEQ ID NO: 670
  source 1..100: mol_type = other RNA

SEQ ID NO: 1089 - RNA, 100 nt, synthetic construct; identical to SEQ ID NO: 671
  source 1..100: mol_type = other RNA

SEQ ID NO: 1090 - RNA, 100 nt, synthetic construct; identical to SEQ ID NO: 672
  source 1..100: mol_type = other RNA

SEQ ID NO: 1091 - RNA, 100 nt, synthetic construct; identical to SEQ ID NO: 673
  source 1..100: mol_type = other RNA

SEQ ID NO: 1092 - RNA, 100 nt, synthetic construct; identical to SEQ ID NO: 674
  source 1..100: mol_type = other RNA

SEQ ID NO: 1093 - RNA, 100 nt, synthetic construct; identical to SEQ ID NO: 675
  source 1..100: mol_type = other RNA

SEQ ID NO: 1094 - RNA, 109 nt, synthetic construct; identical to SEQ ID NO: 628
  source 1..109: mol_type = other RNA

SEQ ID NO: 1095 - RNA, 109 nt, synthetic construct; identical to SEQ ID NO: 628
  source 1..109: mol_type = other RNA

SEQ ID NO: 1096 - RNA, 109 nt, synthetic construct; identical to SEQ ID NO: 629
  source 1..109: mol_type = other RNA

SEQ ID NO: 1097 - RNA, 109 nt, synthetic construct; identical to SEQ ID NO: 629
  source 1..109: mol_type = other RNA

SEQ ID NO: 1098 - RNA, 109 nt, synthetic construct; identical to SEQ ID NO: 630
  source 1..109: mol_type = other RNA

SEQ ID NO: 1099 - RNA, 109 nt, synthetic construct; identical to SEQ ID NO: 630
  source 1..109: mol_type = other RNA

SEQ ID NO: 1100 - RNA, 109 nt, synthetic construct; identical to SEQ ID NO: 631
  source 1..109: mol_type = other RNA

SEQ ID NO: 1101 - RNA, 109 nt, synthetic construct; identical to SEQ ID NO: 631
  source 1..109: mol_type = other RNA

SEQ ID NO: 1102 - RNA, 109 nt, synthetic construct; identical to SEQ ID NO: 657
  source 1..109: mol_type = other RNA

SEQ ID NO: 1103 - RNA, 109 nt, synthetic construct; identical to SEQ ID NO: 657
  source 1..109: mol_type = other RNA

SEQ ID NO: 1104 - RNA, 109 nt, synthetic construct; identical to SEQ ID NO: 656
  source 1..109: mol_type = other RNA

SEQ ID NO: 1105 - RNA, 109 nt, synthetic construct; identical to SEQ ID NO: 656
  source 1..109: mol_type = other RNA

SEQ ID NO: 1106 - RNA, 109 nt, synthetic construct; identical to SEQ ID NO: 654
  source 1..109: mol_type = other RNA

SEQ ID NO: 1107 - RNA, 109 nt, synthetic construct; identical to SEQ ID NO: 654
  source 1..109: mol_type = other RNA

SEQ ID NO: 1108 - RNA, 109 nt, synthetic construct; identical to SEQ ID NO: 653
  source 1..109: mol_type = other RNA

SEQ ID NO: 1109 - RNA, 109 nt, synthetic construct; identical to SEQ ID NO: 653
  source 1..109: mol_type = other RNA

SEQ ID NO: 1110 - RNA, 109 nt, synthetic construct; identical to SEQ ID NO: 649
  source 1..109: mol_type = other RNA

SEQ ID NO: 1111 - RNA, 109 nt, synthetic construct; identical to SEQ ID NO: 649
  source 1..109: mol_type = other RNA

SEQ ID NO: 1112 - RNA, 109 nt, synthetic construct; identical to SEQ ID NO: 648
  source 1..109: mol_type = other RNA

SEQ ID NO: 1113 - RNA, 109 nt, synthetic construct; identical to SEQ ID NO: 648
  source 1..109: mol_type = other RNA

SEQ ID NO: 1114 - RNA, 109 nt, synthetic construct; identical to SEQ ID NO: 644
  source 1..109: mol_type = other RNA

SEQ ID NO: 1115 - RNA, 109 nt, synthetic construct; identical to SEQ ID NO: 644
  source 1..109: mol_type = other RNA

SEQ ID NO: 1116 - RNA, 109 nt, synthetic construct; identical to SEQ ID NO: 636
  source 1..109: mol_type = other RNA

SEQ ID NO: 1117 - RNA, 109 nt, synthetic construct; identical to SEQ ID NO: 636
  source 1..109: mol_type = other RNA

SEQ ID NO: 1118 - RNA, 109 nt, synthetic construct; identical to SEQ ID NO: 637
  source 1..109: mol_type = other RNA

SEQ ID NO: 1119 - RNA, 109 nt, synthetic construct; identical to SEQ ID NO: 637
  source 1..109: mol_type = other RNA

SEQ ID NO: 1120 - RNA, 109 nt, synthetic construct; identical to SEQ ID NO: 638
  source 1..109: mol_type = other RNA

SEQ ID NO: 1121 - RNA, 109 nt, synthetic construct; identical to SEQ ID NO: 638
  source 1..109: mol_type = other RNA

SEQ ID NO: 1122 - RNA, 109 nt, synthetic construct; identical to SEQ ID NO: 503
  source 1..109: mol_type = other RNA

SEQ ID NO: 1123 - RNA, 109 nt, synthetic construct; identical to SEQ ID NO: 503
  source 1..109: mol_type = other RNA

SEQ ID NO: 1124 - RNA, 109 nt, synthetic construct; identical to SEQ ID NO: 640
  source 1..109: mol_type = other RNA

SEQ ID NO: 1125 - RNA, 109 nt, synthetic construct; identical to SEQ ID NO: 640
  source 1..109: mol_type = other RNA

SEQ ID NO: 1126 - RNA, 109 nt, synthetic construct; identical to SEQ ID NO: 641
  source 1..109: mol_type = other RNA

SEQ ID NO: 1127 - RNA, 109 nt, synthetic construct; identical to SEQ ID NO: 641
  source 1..109: mol_type = other RNA

SEQ ID NO: 1128 - RNA, 109 nt, synthetic construct; identical to SEQ ID NO: 642
  source 1..109: mol_type = other RNA

SEQ ID NO: 1129 - RNA, 109 nt, synthetic construct; identical to SEQ ID NO: 642
  source 1..109: mol_type = other RNA

SEQ ID NO: 1130 - RNA, 109 nt, synthetic construct; identical to SEQ ID NO: 643
  source 1..109: mol_type = other RNA

SEQ ID NO: 1131 - RNA, 109 nt, synthetic construct; identical to SEQ ID NO: 643
  source 1..109: mol_type = other RNA

SEQ ID NO: 1132 - RNA, 100 nt, synthetic construct
  source 1..100: mol_type = other RNA
aaaaggctgggggctggtgggttttagagctagaaatagcaagttaaaataaggctagtccgttatcaacttgaaaaagtggcaccgagtcggtgctttt

SEQ ID NO: 1133 - RNA, 100 nt, synthetic construct; identical to SEQ ID NO: 1132
  source 1..100: mol_type = other RNA

SEQ ID NO: 1134 - RNA, 100 nt, synthetic construct; identical to SEQ ID NO: 1132
  source 1..100: mol_type = other RNA

SEQ ID NO: 1135 - RNA, 100 nt, synthetic construct; identical to SEQ ID NO: 1132
  source 1..100: mol_type = other RNA

SEQ ID NO: 1136 - RNA, 100 nt, synthetic construct; identical to SEQ ID NO: 1132
  source 1..100: mol_type = other RNA

SEQ ID NO: 1137 - RNA, 100 nt, synthetic construct; identical to SEQ ID NO: 1132
  source 1..100: mol_type = other RNA

SEQ ID NO: 1138 - RNA, 100 nt, synthetic construct; identical to SEQ ID NO: 1132
  source 1..100: mol_type = other RNA

SEQ ID NO: 1139 - RNA, 100 nt, synthetic construct; identical to SEQ ID NO: 1132
  source 1..100: mol_type = other RNA

SEQ ID NO: 1140 - RNA, 100 nt, synthetic construct
  source 1..100: mol_type = other RNA
aaaggctgggggctggtggggttttagagctagaaatagcaagttaaaataaggctagtccgttatcaacttgaaaaagtggcaccgagtcggtgctttt

SEQ ID NO: 1141 - RNA, 100 nt, synthetic construct; identical to SEQ ID NO: 1140
  source 1..100: mol_type = other RNA

SEQ ID NO: 1142 - RNA, 100 nt, synthetic construct; identical to SEQ ID NO: 1140
  source 1..100: mol_type = other RNA

SEQ ID NO: 1143 - RNA, 100 nt, synthetic construct; identical to SEQ ID NO: 1140
  source 1..100: mol_type = other RNA

SEQ ID NO: 1144 - RNA, 100 nt, synthetic construct
  source 1..100: mol_type = other RNA
aaggctgggggctggtgggggttttagagctagaaatagcaagttaaaataaggctagtccgttatcaacttgaaaaagtggcaccgagtcggtgctttt

SEQ ID NO: 1145 - RNA, 100 nt, synthetic construct; identical to SEQ ID NO: 1144
  source 1..100: mol_type = other RNA

SEQ ID NO: 1146 - RNA, 100 nt, synthetic construct; identical to SEQ ID NO: 1144
  source 1..100: mol_type = other RNA

SEQ ID NO: 1147 - RNA, 100 nt, synthetic construct; identical to SEQ ID NO: 1144
  source 1..100: mol_type = other RNA

SEQ ID NO: 1148 - RNA, 100 nt, synthetic construct; identical to SEQ ID NO: 1144
  source 1..100: mol_type = other RNA

SEQ ID NO: 1149 - RNA, 100 nt, synthetic construct; identical to SEQ ID NO: 1144
  source 1..100: mol_type = other RNA

SEQ ID NO: 1150 - RNA, 100 nt, synthetic construct; identical to SEQ ID NO: 1144
  source 1..100: mol_type = other RNA

SEQ ID NO: 1151 - RNA, 100 nt, synthetic construct; identical to SEQ ID NO: 1144
  source 1..100: mol_type = other RNA

SEQ ID NO: 1152 - RNA, 100 nt, synthetic construct; identical to SEQ ID NO: 1144
  source 1..100: mol_type = other RNA

SEQ ID NO: 1153 - RNA, 100 nt, synthetic construct; identical to SEQ ID NO: 1144
  source 1..100: mol_type = other RNA

SEQ ID NO: 1154 - RNA, 100 nt, synthetic construct
  source 1..100: mol_type = other RNA
aatctgtgttctggcacctggttttagagctagaaatagcaagttaaaataaggctagtccgttatcaacttgaaaaagtggcaccgagtcggtgctttt

SEQ ID NO: 1155 - RNA, 100 nt, synthetic construct; identical to SEQ ID NO: 1154
  source 1..100: mol_type = other RNA

SEQ ID NO: 1156 - RNA, 100 nt, synthetic construct; identical to SEQ ID NO: 1154
  source 1..100: mol_type = other RNA

SEQ ID NO: 1157 - RNA, 100 nt, synthetic construct; identical to SEQ ID NO: 1154
  source 1..100: mol_type = other RNA

SEQ ID NO: 1158 - RNA, 100 nt, synthetic construct; identical to SEQ ID NO: 1154
  source 1..100: mol_type = other RNA

SEQ ID NO: 1159 - RNA, 100 nt, synthetic construct; identical to SEQ ID NO: 1154
  source 1..100: mol_type = other RNA

SEQ ID NO: 1160 - RNA, 100 nt, synthetic construct; identical to SEQ ID NO: 1154
  source 1..100: mol_type = other RNA

SEQ ID NO: 1161 - RNA, 100 nt, synthetic construct; identical to SEQ ID NO: 1154
  source 1..100: mol_type = other RNA

SEQ ID NO: 1162 - RNA, 100 nt, synthetic construct; identical to SEQ ID NO: 1154
  source 1..100: mol_type = other RNA

SEQ ID NO: 1163 - RNA, 100 nt, synthetic construct; identical to SEQ ID NO: 1154
  source 1..100: mol_type = other RNA

SEQ ID NO: 1164 - RNA, 100 nt, synthetic construct
  source 1..100: mol_type = other RNA
acaatctgtgttctggcaccgttttagagctagaaatagcaagttaaaataaggctagtccgttatcaacttgaaaaagtggcaccgagtcggtgctttt

SEQ ID NO: 1165 - RNA, 100 nt, synthetic construct; identical to SEQ ID NO: 1164
  source 1..100: mol_type = other RNA

SEQ ID NO: 1166 - RNA, 100 nt, synthetic construct; identical to SEQ ID NO: 1164
  source 1..100: mol_type = other RNA

SEQ ID NO: 1167 - RNA, 100 nt, synthetic construct; identical to SEQ ID NO: 1164
  source 1..100: mol_type = other RNA

SEQ ID NO: 1168 - RNA, 100 nt, synthetic construct; identical to SEQ ID NO: 1164
  source 1..100: mol_type = other RNA

SEQ ID NO: 1169 - RNA, 100 nt, synthetic construct; identical to SEQ ID NO: 1164
  source 1..100: mol_type = other RNA

SEQ ID NO: 1170 - RNA, 100 nt, synthetic construct; identical to SEQ ID NO: 1164
  source 1..100: mol_type = other RNA

SEQ ID NO: 1171 - RNA, 100 nt, synthetic construct; identical to SEQ ID NO: 1164
  source 1..100: mol_type = other RNA

SEQ ID NO: 1172 - RNA, 100 nt, synthetic construct
  source 1..100: mol_type = other RNA
acacagattgtataaaaggcgttttagagctagaaatagcaagttaaaataaggctagtccgttatcaacttgaaaaagtggcaccgagtcggtgctttt

SEQ ID NO: 1173 - RNA, 100 nt, synthetic construct; identical to SEQ ID NO: 1172
  source 1..100: mol_type = other RNA

SEQ ID NO: 1174 - RNA, 100 nt, synthetic construct; identical to SEQ ID NO: 1172
  source 1..100: mol_type = other RNA

SEQ ID NO: 1175 - RNA, 100 nt, synthetic construct; identical to SEQ ID NO: 1172
  source 1..100: mol_type = other RNA

SEQ ID NO: 1176 - RNA, 100 nt, synthetic construct; identical to SEQ ID NO: 1172
  source 1..100: mol_type = other RNA

SEQ ID NO: 1177 - RNA, 100 nt, synthetic construct; identical to SEQ ID NO: 1172
  source 1..100: mol_type = other RNA

SEQ ID NO: 1178 - RNA, 100 nt, synthetic construct; identical to SEQ ID NO: 1172
  source 1..100: mol_type = other RNA

SEQ ID NO: 1179 - RNA, 100 nt, synthetic construct; identical to SEQ ID NO: 1172
  source 1..100: mol_type = other RNA

SEQ ID NO: 1180 - RNA, 100 nt, synthetic construct; identical to SEQ ID NO: 1172
  source 1..100: mol_type = other RNA

SEQ ID NO: 1181 - RNA, 100 nt, synthetic construct; identical to SEQ ID NO: 1172
  source 1..100: mol_type = other RNA

SEQ ID NO: 1182 - RNA, 100 nt, synthetic construct
  source 1..100: mol_type = other RNA
acagattgtataaaaggctggttttagagctagaaatagcaagttaaaataaggctagtccgttatcaacttgaaaaagtggcaccgagtcggtgctttt

SEQ ID NO: 1183 - RNA, 100 nt, synthetic construct; identical to SEQ ID NO: 1182
  source 1..100: mol_type = other RNA

SEQ ID NO: 1184 - RNA, 100 nt, synthetic construct; identical to SEQ ID NO: 1182
  source 1..100: mol_type = other RNA

SEQ ID NO: 1185 - RNA, 100 nt, synthetic construct; identical to SEQ ID NO: 1182
  source 1..100: mol_type = other RNA

SEQ ID NO: 1186 - RNA, 100 nt, synthetic construct; identical to SEQ ID NO: 1182
  source 1..100: mol_type = other RNA

SEQ ID NO: 1187 - RNA, 100 nt, synthetic construct; identical to SEQ ID NO: 1182
  source 1..100: mol_type = other RNA

SEQ ID NO: 1188 - RNA, 100 nt, synthetic construct; identical to SEQ ID NO: 1182
  source 1..100: mol_type = other RNA

SEQ ID NO: 1189 - RNA, 100 nt, synthetic construct; identical to SEQ ID NO: 1182
  source 1..100: mol_type = other RNA

SEQ ID NO: 1190 - RNA, 100 nt, synthetic construct; identical to SEQ ID NO: 1182
  source 1..100: mol_type = other RNA

SEQ ID NO: 1191 - RNA, 100 nt, synthetic construct; identical to SEQ ID NO: 1182
  source 1..100: mol_type = other RNA

SEQ ID NO: 1192 - RNA, 100 nt, synthetic construct
  source 1..100: mol_type = other RNA
agaacacagattgtataaaagttttagagctagaaatagcaagttaaaataaggctagtccgttatcaacttgaaaaagtggcaccgagtcggtgctttt

SEQ ID NO: 1193 - RNA, 100 nt, synthetic construct; identical to SEQ ID NO: 1192
  source 1..100: mol_type = other RNA

SEQ ID NO: 1194 - RNA, 100 nt, synthetic construct; identical to SEQ ID NO: 1192
  source 1..100: mol_type = other RNA

SEQ ID NO: 1195 - RNA, 100 nt, synthetic construct; identical to SEQ ID NO: 1192
  source 1..100: mol_type = other RNA

SEQ ID NO: 1196 - RNA, 100 nt, synthetic construct; identical to SEQ ID NO: 1192
  source 1..100: mol_type = other RNA

SEQ ID NO: 1197 - RNA, 100 nt, synthetic construct; identical to SEQ ID NO: 1192
  source 1..100: mol_type = other RNA

SEQ ID NO: 1198 - RNA, 100 nt, synthetic construct; identical to SEQ ID NO: 1192
  source 1..100: mol_type = other RNA

SEQ ID NO: 1199 - RNA, 100 nt, synthetic construct; identical to SEQ ID NO: 1192
  source 1..100: mol_type = other RNA

SEQ ID NO: 1200 - RNA, 100 nt, synthetic construct; identical to SEQ ID NO: 1192
  source 1..100: mol_type = other RNA

SEQ ID NO: 1201 - RNA, 100 nt, synthetic construct
  source 1..100: mol_type = other RNA
agattgtataaaaggctggggttttagagctagaaatagcaagttaaaataaggctagtccgttatcaacttgaaaaagtggcaccgagtcggtgctttt

SEQ ID NO: 1202 - RNA, 100 nt, synthetic construct; identical to SEQ ID NO: 1201
  source 1..100: mol_type = other RNA

SEQ ID NO: 1203 - RNA, 100 nt, synthetic construct; identical to SEQ ID NO: 1201
  source 1..100: mol_type = other RNA

SEQ ID NO: 1204 - RNA, 100 nt, synthetic construct; identical to SEQ ID NO: 1201
  source 1..100: mol_type = other RNA

SEQ ID NO: 1205 - RNA, 100 nt, synthetic construct; identical to SEQ ID NO: 1201
  source 1..100: mol_type = other RNA

SEQ ID NO: 1206 - RNA, 100 nt, synthetic construct; identical to SEQ ID NO: 1201
  source 1..100: mol_type = other RNA

SEQ ID NO: 1207 - RNA, 100 nt, synthetic construct; identical to SEQ ID NO: 1201
  source 1..100: mol_type = other RNA

SEQ ID NO: 1208 - RNA, 100 nt, synthetic construct; identical to SEQ ID NO: 1201
  source 1..100: mol_type = other RNA

SEQ ID NO: 1209 - RNA, 100 nt, synthetic construct; identical to SEQ ID NO: 1201
  source 1..100: mol_type = other RNA

SEQ ID NO: 1210 - RNA, 100 nt, synthetic construct; identical to SEQ ID NO: 1201
  source 1..100: mol_type = other RNA

SEQ ID NO: 1211 - RNA, 109 nt, synthetic construct
  source 1..109: mol_type = other RNA
agattgtataaaaggctgggggttttagtactctgtaatgaaaattacagaatctactaaaacaaggcaaaatgccgtgtttatctcgtcaacttgttggcgagatttt

SEQ ID NO: 1212 - RNA, 100 nt, synthetic construct
  source 1..100: mol_type = other RNA
ataaaaggctgggggctggtgttttagagctagaaatagcaagttaaaataaggctagtccgttatcaacttgaaaaagtggcaccgagtcggtgctttt

SEQ ID NO: 1213 - RNA, 100 nt, synthetic construct; identical to SEQ ID NO: 1212
  source 1..100: mol_type = other RNA

SEQ ID NO: 1214 - RNA, 100 nt, synthetic construct; identical to SEQ ID NO: 1212
  source 1..100: mol_type = other RNA

SEQ ID NO: 1215 - RNA, 100 nt, synthetic construct; identical to SEQ ID NO: 1212
  source 1..100: mol_type = other RNA

SEQ ID NO: 1216 - RNA, 100 nt, synthetic construct; identical to SEQ ID NO: 1212
  source 1..100: mol_type = other RNA

SEQ ID NO: 1217 - RNA, 100 nt, synthetic construct; identical to SEQ ID NO: 1212
  source 1..100: mol_type = other RNA

SEQ ID NO: 1218 - RNA, 100 nt, synthetic construct; identical to SEQ ID NO: 1212
  source 1..100: mol_type = other RNA

SEQ ID NO: 1219 - RNA, 100 nt, synthetic construct; identical to SEQ ID NO: 1212
  source 1..100: mol_type = other RNA

SEQ ID NO: 1220 - RNA, 100 nt, synthetic construct; identical to SEQ ID NO: 1212
  source 1..100: mol_type = other RNA

SEQ ID NO: 1221 - RNA, 100 nt, synthetic construct
  source 1..100: mol_type = other RNA
atctgtgttctggcacctgcgttttagagctagaaatagcaagttaaaataaggctagtccgttatcaacttgaaaaagtggcaccgagtcggtgctttt

SEQ ID NO: 1222 - RNA, 100 nt, synthetic construct; identical to SEQ ID NO: 1221
  source 1..100: mol_type = other RNA

SEQ ID NO: 1223 - RNA, 100 nt, synthetic construct; identical to SEQ ID NO: 1221
  source 1..100: mol_type = other RNA

SEQ ID NO: 1224 - RNA, 100 nt, synthetic construct; identical to SEQ ID NO: 1221
  source 1..100: mol_type = other RNA

SEQ ID NO: 1225 - RNA, 100 nt, synthetic construct; identical to SEQ ID NO: 1221
  source 1..100: mol_type = other RNA

SEQ ID NO: 1226 - RNA, 100 nt, synthetic construct; identical to SEQ ID NO: 1221
  source 1..100: mol_type = other RNA

SEQ ID NO: 1227 - RNA, 100 nt, synthetic construct; identical to SEQ ID NO: 1221
  source 1..100: mol_type = other RNA

SEQ ID NO: 1228 - RNA, 100 nt, synthetic construct; identical to SEQ ID NO: 1221
  source 1..100: mol_type = other RNA

SEQ ID NO: 1229 - RNA, 100 nt, synthetic construct; identical to SEQ ID NO: 1221
  source 1..100: mol_type = other RNA

SEQ ID NO: 1230 - RNA, 100 nt, synthetic construct
  source 1..100: mol_type = other RNA
cacagattgtataaaaggctgttttagagctagaaatagcaagttaaaataaggctagtccgttatcaacttgaaaaagtggcaccgagtcggtgctttt

SEQ ID NO: 1231 - RNA, 100 nt, synthetic construct; identical to SEQ ID NO: 1230
  source 1..100: mol_type = other RNA

SEQ ID NO: 1232 - RNA, 100 nt, synthetic construct; identical to SEQ ID NO: 1230
  source 1..100: mol_type = other RNA

SEQ ID NO: 1233 - RNA, 100 nt, synthetic construct; identical to SEQ ID NO: 1230
  source 1..100: mol_type = other RNA

SEQ ID NO: 1234 - RNA, 100 nt, synthetic construct; identical to SEQ ID NO: 1230
  source 1..100: mol_type = other RNA

SEQ ID NO: 1235 - RNA, 100 nt, synthetic construct; identical to SEQ ID NO: 1230
  source 1..100: mol_type = other RNA

SEQ ID NO: 1236 - RNA, 100 nt, synthetic construct; identical to SEQ ID NO: 1230
  source 1..100: mol_type = other RNA

SEQ ID NO: 1237 - RNA, 100 nt, synthetic construct; identical to SEQ ID NO: 1230
  source 1..100: mol_type = other RNA

SEQ ID NO: 1238 - RNA, 100 nt, synthetic construct; identical to SEQ ID NO: 1230
  source 1..100: mol_type = other RNA

SEQ ID NO: 1239 - RNA, 100 nt, synthetic construct; identical to SEQ ID NO: 1230
  source 1..100: mol_type = other RNA

SEQ ID NO: 1240 - RNA, 100 nt, synthetic construct
  source 1..100: mol_type = other RNA
cagaacacagattgtataaagttttagagctagaaatagcaagttaaaataaggctagtccgttatcaacttgaaaaagtggcaccgagtcggtgctttt

SEQ ID NO: 1241 - RNA, 100 nt, synthetic construct; identical to SEQ ID NO: 1240
  source 1..100: mol_type = other RNA

SEQ ID NO: 1242 - RNA, 100 nt, synthetic construct; identical to SEQ ID NO: 1240
  source 1..100: mol_type = other RNA

SEQ ID NO: 1243 - RNA, 100 nt, synthetic construct; identical to SEQ ID NO: 1240
  source 1..100: mol_type = other RNA

SEQ ID NO: 1244 - RNA, 100 nt, synthetic construct; identical to SEQ ID NO: 1240
  source 1..100: mol_type = other RNA

SEQ ID NO: 1245 - RNA, 100 nt, synthetic construct; identical to SEQ ID NO: 1240
  source 1..100: mol_type = other RNA

SEQ ID NO: 1246 - RNA, 100 nt, synthetic construct; identical to SEQ ID NO: 1240
  source 1..100: mol_type = other RNA

SEQ ID NO: 1247 - RNA, 100 nt, synthetic construct; identical to SEQ ID NO: 1240
  source 1..100: mol_type = other RNA

SEQ ID NO: 1248 - RNA, 100 nt, synthetic construct; identical to SEQ ID NO: 1240
  source 1..100: mol_type = other RNA

SEQ ID NO: 1249 - RNA, 100 nt, synthetic construct; identical to SEQ ID NO: 1240
  source 1..100: mol_type = other RNA

SEQ ID NO: 1250 - RNA, 100 nt, synthetic construct; identical to SEQ ID NO: 1240
  source 1..100: mol_type = other RNA

SEQ ID NO: 1251 - RNA, 100 nt, synthetic construct
  source 1..100: mol_type = other RNA
cagattgtataaaaggctgggttttagagctagaaatagcaagttaaaataaggctagtccgttatcaacttgaaaaagtggcaccgagtcggtgctttt

SEQ ID NO: 1252 - RNA, 100 nt, synthetic construct; identical to SEQ ID NO: 1251
  source 1..100: mol_type = other RNA

SEQ ID NO: 1253 - RNA, 100 nt, synthetic construct; identical to SEQ ID NO: 1251
  source 1..100: mol_type = other RNA

SEQ ID NO: 1254 - RNA, 100 nt, synthetic construct; identical to SEQ ID NO: 1251
  source 1..100: mol_type = other RNA

SEQ ID NO: 1255 - RNA, 100 nt, synthetic construct; identical to SEQ ID NO: 1251
  source 1..100: mol_type = other RNA

SEQ ID NO: 1256 - RNA, 100 nt, synthetic construct; identical to SEQ ID NO: 1251
  source 1..100: mol_type = other RNA

SEQ ID NO: 1257 - RNA, 100 nt, synthetic construct; identical to SEQ ID NO: 1251
  source 1..100: mol_type = other RNA

SEQ ID NO: 1258 - RNA, 100 nt, synthetic construct; identical to SEQ ID NO: 1251
  source 1..100: mol_type = other RNA

SEQ ID NO: 1259 - RNA, 100 nt, synthetic construct; identical to SEQ ID NO: 1251
  source 1..100: mol_type = other RNA

SEQ ID NO: 1260 - RNA, 100 nt, synthetic construct; identical to SEQ ID NO: 1251
  source 1..100: mol_type = other RNA

SEQ ID NO: 1261 - RNA, 100 nt, synthetic construct; identical to SEQ ID NO: 1251
  source 1..100: mol_type = other RNA

SEQ ID NO: 1262 - RNA, 100 nt, synthetic construct
  source 1..100: mol_type = other RNA
cagcccccagccttttatacgttttagagctagaaatagcaagttaaaataaggctagtccgttatcaacttgaaaaagtggcaccgagtcggtgctttt

SEQ ID NO: 1263 - RNA, 100 nt, synthetic construct; identical to SEQ ID NO: 1262
  source 1..100: mol_type = other RNA

SEQ ID NO: 1264 - RNA, 100 nt, synthetic construct; identical to SEQ ID NO: 1262
  source 1..100: mol_type = other RNA

SEQ ID NO: 1265 - RNA, 100 nt, synthetic construct; identical to SEQ ID NO: 1262
  source 1..100: mol_type = other RNA

SEQ ID NO: 1266 - RNA, 100 nt, synthetic construct; identical to SEQ ID NO: 1262
  source 1..100: mol_type = other RNA

SEQ ID NO: 1267 - RNA, 109 nt, synthetic construct
  source 1..109: mol_type = other RNA
ccaccagcccccagccttttagttttagtactctgtaatgaaaattacagaatctactaaaacaaggcaaaatgccgtgtttatctcgtcaacttgttggcgagatttt

SEQ ID NO: 1268 - RNA, 100 nt, synthetic construct
  source 1..100: mol_type = other RNA
ccagcccccagccttttatagttttagagctagaaatagcaagttaaaataaggctagtccgttatcaacttgaaaaagtggcaccgagtcggtgctttt

SEQ ID NO: 1269 - RNA, 100 nt, synthetic construct; identical to SEQ ID NO: 1268
  source 1..100: mol_type = other RNA

SEQ ID NO: 1270 - RNA, 100 nt, synthetic construct; identical to SEQ ID NO: 1268
  source 1..100: mol_type = other RNA

SEQ ID NO: 1271 - RNA, 100 nt, synthetic construct; identical to SEQ ID NO: 1268
  source 1..100: mol_type = other RNA

SEQ ID NO: 1272 - RNA, 100 nt, synthetic construct
  source 1..100: mol_type = other RNA
ccagccttttatacaatctggttttagagctagaaatagcaagttaaaataaggctagtccgttatcaacttgaaaaagtggcaccgagtcggtgctttt

SEQ ID NO: 1273 - RNA, 100 nt, synthetic construct; identical to SEQ ID NO: 1272
  source 1..100: mol_type = other RNA

SEQ ID NO: 1274 - RNA, 100 nt, synthetic construct; identical to SEQ ID NO: 1272
  source 1..100: mol_type = other RNA

SEQ ID NO: 1275 - RNA, 100 nt, synthetic construct; identical to SEQ ID NO: 1272
  source 1..100: mol_type = other RNA

SEQ ID NO: 1276 - RNA, 100 nt, synthetic construct; identical to SEQ ID NO: 1272
  source 1..100: mol_type = other RNA

SEQ ID NO: 1277 - RNA, 100 nt, synthetic construct; identical to SEQ ID NO: 1272
  source 1..100: mol_type = other RNA

SEQ ID NO: 1278 - RNA, 100 nt, synthetic construct; identical to SEQ ID NO: 1272
  source 1..100: mol_type = other RNA

SEQ ID NO: 1279 - RNA, 100 nt, synthetic construct
  source 1..100: mol_type = other RNA
ccccagccttttatacaatcgttttagagctagaaatagcaagttaaaataaggctagtccgttatcaacttgaaaaagtggcaccgagtcggtgctttt

SEQ ID NO: 1280 - RNA, 100 nt, synthetic construct; identical to SEQ ID NO: 1279
  source 1..100: mol_type = other RNA

SEQ ID NO: 1281 - RNA, 100 nt, synthetic construct; identical to SEQ ID NO: 1279
  source 1..100: mol_type = other RNA

SEQ ID NO: 1282 - RNA, 100 nt, synthetic construct; identical to SEQ ID NO: 1279
  source 1..100: mol_type = other RNA

SEQ ID NO: 1283 - RNA, 100 nt, synthetic construct; identical to SEQ ID NO: 1279
  source 1..100: mol_type = other RNA

SEQ ID NO: 1284 - RNA, 100 nt, synthetic construct
  source 1..100: mol_type = other RNA
ctgggggctggtggggagcagttttagagctagaaatagcaagttaaaataaggctagtccgttatcaacttgaaaaagtggcaccgagtcggtgctttt

SEQ ID NO: 1285 - RNA, 100 nt, synthetic construct; identical to SEQ ID NO: 1284
  source 1..100: mol_type = other RNA

SEQ ID NO: 1286 - RNA, 100 nt, synthetic construct; identical to SEQ ID NO: 1284
  source 1..100: mol_type = other RNA

SEQ ID NO: 1287 - RNA, 100 nt, synthetic construct; identical to SEQ ID NO: 1284
  source 1..100: mol_type = other RNA

SEQ ID NO: 1288 - RNA, 100 nt, synthetic construct; identical to SEQ ID NO: 1284
  source 1..100: mol_type = other RNA

SEQ ID NO: 1289 - RNA, 100 nt, synthetic construct; identical to SEQ ID NO: 1284
  source 1..100: mol_type = other RNA

SEQ ID NO: 1290 - RNA, 100 nt, synthetic construct; identical to SEQ ID NO: 1284
  source 1..100: mol_type = other RNA

SEQ ID NO: 1291 - RNA, 100 nt, synthetic construct; identical to SEQ ID NO: 1284
  source 1..100: mol_type = other RNA

SEQ ID NO: 1292 - RNA, 100 nt, synthetic construct; identical to SEQ ID NO: 1284
  source 1..100: mol_type = other RNA

SEQ ID NO: 1293 - RNA, 100 nt, synthetic construct; identical to SEQ ID NO: 1284
  source 1..100: mol_type = other RNA

SEQ ID NO: 1294 - RNA, 100 nt, synthetic construct
  source 1..100: mol_type = other RNA
cttttatacaatctgtgttcgttttagagctagaaatagcaagttaaaataaggctagtccgttatcaacttgaaaaagtggcaccgagtcggtgctttt

SEQ ID NO: 1295 - RNA, 100 nt, synthetic construct; identical to SEQ ID NO: 1294
  source 1..100: mol_type = other RNA

SEQ ID NO: 1296 - RNA, 100 nt, synthetic construct; identical to SEQ ID NO: 1294
  source 1..100: mol_type = other RNA

SEQ ID NO: 1297 - RNA, 100 nt, synthetic construct; identical to SEQ ID NO: 1294
  source 1..100: mol_type = other RNA

SEQ ID NO: 1298 - RNA, 100 nt, synthetic construct; identical to SEQ ID NO: 1294
  source 1..100: mol_type = other RNA

SEQ ID NO: 1299 - RNA, 100 nt, synthetic construct; identical to SEQ ID NO: 1294
  source 1..100: mol_type = other RNA

SEQ ID NO: 1300 - RNA, 100 nt, synthetic construct; identical to SEQ ID NO: 1294
  source 1..100: mol_type = other RNA

SEQ ID NO: 1301 - RNA, 100 nt, synthetic construct; identical to SEQ ID NO: 1294
  source 1..100: mol_type = other RNA

SEQ ID NO: 1302 - RNA, 100 nt, synthetic construct; identical to SEQ ID NO: 1294
  source 1..100: mol_type = other RNA

SEQ ID NO: 1303 - RNA, 100 nt, synthetic construct; identical to SEQ ID NO: 1294
  source 1..100: mol_type = other RNA

SEQ ID NO: 1304 - RNA, 100 nt, synthetic construct; identical to SEQ ID NO: 1294
  source 1..100: mol_type = other RNA

SEQ ID NO: 1305 - RNA, 100 nt, synthetic construct
  source 1..100: mol_type = other RNA
gctgggggctggtggggagcgttttagagctagaaatagcaagttaaaataaggctagtccgttatcaacttgaaaaagtggcaccgagtcggtgctttt

SEQ ID NO: 1306 - RNA, 100 nt, synthetic construct; identical to SEQ ID NO: 1305
  source 1..100: mol_type = other RNA

SEQ ID NO: 1307 - RNA, 100 nt, synthetic construct; identical to SEQ ID NO: 1305
  source 1..100: mol_type = other RNA

SEQ ID NO: 1308 - RNA, 100 nt, synthetic construct; identical to SEQ ID NO: 1305
  source 1..100: mol_type = other RNA

SEQ ID NO: 1309 - RNA, 100 nt, synthetic construct; identical to SEQ ID NO: 1305
  source 1..100: mol_type = other RNA

SEQ ID NO: 1310 - RNA, 100 nt, synthetic construct; identical to SEQ ID NO: 1305
  source 1..100: mol_type = other RNA

SEQ ID NO: 1311 - RNA, 100 nt, synthetic construct; identical to SEQ ID NO: 1305
  source 1..100: mol_type = other RNA

SEQ ID NO: 1312 - RNA, 100 nt, synthetic construct; identical to SEQ ID NO: 1305
  source 1..100: mol_type = other RNA

SEQ ID NO: 1313 - RNA, 100 nt, synthetic construct; identical to SEQ ID NO: 1305
  source 1..100: mol_type = other RNA

SEQ ID NO: 1314 - RNA, 100 nt, synthetic construct; identical to SEQ ID NO: 1305
  source 1..100: mol_type = other RNA

SEQ ID NO: 1315 - RNA, 100 nt, synthetic construct
  source 1..100: mol_type = other RNA
ggctgggggctggtggggaggttttagagctagaaatagcaagttaaaataaggctagtccgttatcaacttgaaaaagtggcaccgagtcggtgctttt

SEQ ID NO: 1316 - RNA, 100 nt, synthetic construct; identical to SEQ ID NO: 1315
  source 1..100: mol_type = other RNA

SEQ ID NO: 1317 - RNA, 100 nt, synthetic construct; identical to SEQ ID NO: 1315
  source 1..100: mol_type = other RNA

SEQ ID NO: 1318 - RNA, 100 nt, synthetic construct
  source 1..100: mol_type = other RNA
taaaaggctgggggctggtggttttagagctagaaatagcaagttaaaataaggctagtccgttatcaacttgaaaaagtggcaccgagtcggtgctttt

SEQ ID NO: 1319 - RNA, 100 nt, synthetic construct; identical to SEQ ID NO: 1318
  source 1..100: mol_type = other RNA

SEQ ID NO: 1320 - RNA, 100 nt, synthetic construct; identical to SEQ ID NO: 1318
  source 1..100: mol_type = other RNA

SEQ ID NO: 1321 - RNA, 100 nt, synthetic construct; identical to SEQ ID NO: 1318
  source 1..100: mol_type = other RNA

SEQ ID NO: 1322 - RNA, 100 nt, synthetic construct; identical to SEQ ID NO: 1318
  source 1..100: mol_type = other RNA

SEQ ID NO: 1323 - RNA, 100 nt, synthetic construct; identical to SEQ ID NO: 1318
  source 1..100: mol_type = other RNA

SEQ ID NO: 1324 - RNA, 100 nt, synthetic construct; identical to SEQ ID NO: 1318
  source 1..100: mol_type = other RNA

SEQ ID NO: 1325 - RNA, 100 nt, synthetic construct; identical to SEQ ID NO: 1318
  source 1..100: mol_type = other RNA

SEQ ID NO: 1326 - RNA, 100 nt, synthetic construct; identical to SEQ ID NO: 1318
  source 1..100: mol_type = other RNA

SEQ ID NO: 1327 - RNA, 100 nt, synthetic construct; identical to SEQ ID NO: 1318
  source 1..100: mol_type = other RNA

SEQ ID NO: 1328 - RNA, 100 nt, synthetic construct
  source 1..100: mol_type = other RNA
tataaaaggctgggggctgggttttagagctagaaatagcaagttaaaataaggctagtccgttatcaacttgaaaaagtggcaccgagtcggtgctttt

SEQ ID NO: 1329 - RNA, 100 nt, synthetic construct; identical to SEQ ID NO: 1328
  source 1..100: mol_type = other RNA

SEQ ID NO: 1330 - RNA, 100 nt, synthetic construct; identical to SEQ ID NO: 1328
  source 1..100: mol_type = other RNA

SEQ ID NO: 1331 - RNA, 100 nt, synthetic construct; identical to SEQ ID NO: 1328
  source 1..100: mol_type = other RNA

SEQ ID NO: 1332 - RNA, 100 nt, synthetic construct; identical to SEQ ID NO: 1328
  source 1..100: mol_type = other RNA

SEQ ID NO: 1333 - RNA, 100 nt, synthetic construct; identical to SEQ ID NO: 1328
  source 1..100: mol_type = other RNA

SEQ ID NO: 1334 - RNA, 100 nt, synthetic construct; identical to SEQ ID NO: 1328
  source 1..100: mol_type = other RNA

SEQ ID NO: 1335 - RNA, 100 nt, synthetic construct; identical to SEQ ID NO: 1328
  source 1..100: mol_type = other RNA

SEQ ID NO: 1336 - RNA, 100 nt, synthetic construct; identical to SEQ ID NO: 1328
  source 1..100: mol_type = other RNA

SEQ ID NO: 1337 - RNA, 100 nt, synthetic construct; identical to SEQ ID NO: 1328
  source 1..100: mol_type = other RNA

SEQ ID NO: 1338 - RNA, 119 nt, synthetic construct
  source 1..119: mol_type = other RNA
gttctgtcttttggtcaggacaaccgtctagctataagtgctgcagggtgtgagaaactcctattgctggacgatgtctcttacgaggcattagcactataaaaggctgggggctggtg

SEQ ID NO: 1339 - RNA, 119 nt, synthetic construct
  source 1..119: mol_type = other RNA
gttctgtcttttggtcaggacaaccgtctagctataagtgctgcagggtgtgagaaactcctattgctggacgatgtctcttacgaggcattagcactatacaatctgtgttctggcac

SEQ ID NO: 1340 - RNA, 100 nt, synthetic construct
  source 1..100: mol_type = other RNA
tgggggctggtggggagcaggttttagagctagaaatagcaagttaaaataaggctagtccgttatcaacttgaaaaagtggcaccgagtcggtgctttt

SEQ ID NO: 1341 - RNA, 100 nt, synthetic construct; identical to SEQ ID NO: 1340
  source 1..100: mol_type = other RNA

SEQ ID NO: 1342 - RNA, 100 nt, synthetic construct; identical to SEQ ID NO: 1340
  source 1..100: mol_type = other RNA

SEQ ID NO: 1343 - RNA, 100 nt, synthetic construct; identical to SEQ ID NO: 1340
  source 1..100: mol_type = other RNA

SEQ ID NO: 1344 - RNA, 100 nt, synthetic construct; identical to SEQ ID NO: 1340
  source 1..100: mol_type = other RNA

SEQ ID NO: 1345 - RNA, 100 nt, synthetic construct; identical to SEQ ID NO: 1340
  source 1..100: mol_type = other RNA

SEQ ID NO: 1346 - RNA, 100 nt, synthetic construct; identical to SEQ ID NO: 1340
  source 1..100: mol_type = other RNA

SEQ ID NO: 1347 - RNA, 100 nt, synthetic construct; identical to SEQ ID NO: 1340
  source 1..100: mol_type = other RNA

SEQ ID NO: 1348 - RNA, 100 nt, synthetic construct
  source 1..100: mol_type = other RNA
tgtataaaaggctgggggctgttttagagctagaaatagcaagttaaaataaggctagtccgttatcaacttgaaaaagtggcaccgagtcggtgctttt

SEQ ID NO: 1349 - RNA, 100 nt, synthetic construct; identical to SEQ ID NO: 1348
  source 1..100: mol_type = other RNA

SEQ ID NO: 1350 - RNA, 100 nt, synthetic construct; identical to SEQ ID NO: 1348
  source 1..100: mol_type = other RNA

SEQ ID NO: 1351 - RNA, 100 nt, synthetic construct; identical to SEQ ID NO: 1348
  source 1..100: mol_type = other RNA

SEQ ID NO: 1352 - RNA, 100 nt, synthetic construct; identical to SEQ ID NO: 1348
  source 1..100: mol_type = other RNA

SEQ ID NO: 1353 - RNA, 100 nt, synthetic construct
  source 1..100: mol_type = other RNA
ttatacaatctgtgttctgggttttagagctagaaatagcaagttaaaataaggctagtccgttatcaacttgaaaaagtggcaccgagtcggtgctttt

SEQ ID NO: 1354 - RNA, 100 nt, synthetic construct; identical to SEQ ID NO: 1353
  source 1..100: mol_type = other RNA

SEQ ID NO: 1355 - RNA, 100 nt, synthetic construct; identical to SEQ ID NO: 1353
  source 1..100: mol_type = other RNA

SEQ ID NO: 1356 - RNA, 100 nt, synthetic construct; identical to SEQ ID NO: 1353
  source 1..100: mol_type = other RNA

SEQ ID NO: 1357 - RNA, 100 nt, synthetic construct; identical to SEQ ID NO: 1353
  source 1..100: mol_type = other RNA

SEQ ID NO: 1358 - RNA, 100 nt, synthetic construct
  source 1..100: mol_type = other RNA
ttgtataaaaggctgggggcgttttagagctagaaatagcaagttaaaataaggctagtccgttatcaacttgaaaaagtggcaccgagtcggtgctttt

SEQ ID NO: 1359 - RNA, 100 nt, synthetic construct; identical to SEQ ID NO: 1358
  source 1..100: mol_type = other RNA

SEQ ID NO: 1360 - RNA, 100 nt, synthetic construct; identical to SEQ ID NO: 1358
  source 1..100: mol_type = other RNA

SEQ ID NO: 1361 - RNA, 100 nt, synthetic construct; identical to SEQ ID NO: 1358
  source 1..100: mol_type = other RNA

SEQ ID NO: 1362 - RNA, 100 nt, synthetic construct; identical to SEQ ID NO: 1358
  source 1..100: mol_type = other RNA

SEQ ID NO: 1363 - RNA, 100 nt, synthetic construct; identical to SEQ ID NO: 1358
  source 1..100: mol_type = other RNA

SEQ ID NO: 1364 - RNA, 100 nt, synthetic construct; identical to SEQ ID NO: 1358
  source 1..100: mol_type = other RNA

SEQ ID NO: 1365 - RNA, 100 nt, synthetic construct; identical to SEQ ID NO: 1358
  source 1..100: mol_type = other RNA

SEQ ID NO: 1366 - RNA, 100 nt, synthetic construct; identical to SEQ ID NO: 1358
  source 1..100: mol_type = other RNA

SEQ ID NO: 1367 - RNA, 100 nt, synthetic construct; identical to SEQ ID NO: 1358
  source 1..100: mol_type = other RNA

SEQ ID NO: 1368 - RNA, 100 nt, synthetic construct; identical to SEQ ID NO: 1358
  source 1..100: mol_type = other RNA

SEQ ID NO: 1369 - RNA, 100 nt, synthetic construct; identical to SEQ ID NO: 1358
  source 1..100: mol_type = other RNA

SEQ ID NO: 1370 - RNA, 100 nt, synthetic construct
  source 1..100: mol_type = other RNA
ttttatacaatctgtgttctgttttagagctagaaatagcaagttaaaataaggctagtccgttatcaacttgaaaaagtggcaccgagtcggtgctttt

SEQ ID NO: 1371 - RNA, 100 nt, synthetic construct; identical to SEQ ID NO: 1370
  source 1..100: mol_type = other RNA

SEQ ID NO: 1372 - RNA, 100 nt, synthetic construct; identical to SEQ ID NO: 1370
  source 1..100: mol_type = other RNA

SEQ ID NO: 1373 - RNA, 100 nt, synthetic construct; identical to SEQ ID NO: 1370
  source 1..100: mol_type = other RNA

SEQ ID NO: 1374 - RNA, 100 nt, synthetic construct; identical to SEQ ID NO: 1370
  source 1..100: mol_type = other RNA

SEQ ID NO: 1375 - RNA, 100 nt, synthetic construct; identical to SEQ ID NO: 1370
  source 1..100: mol_type = other RNA

SEQ ID NO: 1376 - RNA, 100 nt, synthetic construct; identical to SEQ ID NO: 1370
  source 1..100: mol_type = other RNA

SEQ ID NO: 1377 - RNA, 100 nt, synthetic construct; identical to SEQ ID NO: 1370
  source 1..100: mol_type = other RNA

SEQ ID NO: 1378 - RNA, 100 nt, synthetic construct; identical to SEQ ID NO: 1370
  source 1..100: mol_type = other RNA

SEQ ID NO: 1379 - RNA, 100 nt, synthetic construct; identical to SEQ ID NO: 1370
  source 1..100: mol_type = other RNA

SEQ ID NO: 1380 - RNA, 100 nt, synthetic construct
  source 1..100: mol_type = other RNA
aacgccatggggagcaatctgttttagagctagaaatagcaagttaaaataaggctagtccgttatcaacttgaaaaagtggcaccgagtcggtgctttt

SEQ ID NO: 1381 - RNA, 100 nt, synthetic construct; identical to SEQ ID NO: 1380
  source 1..100: mol_type = other RNA

SEQ ID NO: 1382 - RNA, 100 nt, synthetic construct
  source 1..100: mol_type = other RNA
acgccatggggagcaatctcgttttagagctagaaatagcaagttaaaataaggctagtccgttatcaacttgaaaaagtggcaccgagtcggtgctttt

SEQ ID NO: 1383 - RNA, 100 nt, synthetic construct; identical to SEQ ID NO: 1382
  source 1..100: mol_type = other RNA

SEQ ID NO: 1384 - RNA, 100 nt, synthetic construct; identical to SEQ ID NO: 1382
  source 1..100: mol_type = other RNA

SEQ ID NO: 1385 - RNA, 100 nt, synthetic construct; identical to SEQ ID NO: 1382
  source 1..100: mol_type = other RNA

SEQ ID NO: 1386 - RNA, 100 nt, synthetic construct; identical to SEQ ID NO: 1382
  source 1..100: mol_type = other RNA

SEQ ID NO: 1387 - RNA, 100 nt, synthetic construct; identical to SEQ ID NO: 1382
  source 1..100: mol_type = other RNA

SEQ ID NO: 1388 - RNA, 100 nt, synthetic construct
  source 1..100: mol_type = other RNA
agattgctccccatggcgttgttttagagctagaaatagcaagttaaaataaggctagtccgttatcaacttgaaaaagtggcaccgagtcggtgctttt

SEQ ID NO: 1389 - RNA, 119 nt, synthetic construct
  source 1..119: mol_type = other RNA
gttctgtcttttggtcaggacaaccgtctagctataagtgctgcagggtgtgagaaactcctattgctggacgatgtctcttacgaggcattagcaccaacgccatggggagcaatctc

SEQ ID NO: 1390 - RNA, 100 nt, synthetic construct
  source 1..100: mol_type = other RNA
ccatggcgttggaaggcagggttttagagctagaaatagcaagttaaaataaggctagtccgttatcaacttgaaaaagtggcaccgagtcggtgctttt

SEQ ID NO: 1391 - RNA, 100 nt, synthetic construct; identical to SEQ ID NO: 1390
  source 1..100: mol_type = other RNA

SEQ ID NO: 1392 - RNA, 100 nt, synthetic construct; identical to SEQ ID NO: 1390
  source 1..100: mol_type = other RNA

SEQ ID NO: 1393 - RNA, 100 nt, synthetic construct; identical to SEQ ID NO: 1390
  source 1..100: mol_type = other RNA

SEQ ID NO: 1394 - RNA, 100 nt, synthetic construct
  source 1..100: mol_type = other RNA
cccatggcgttggaaggcaggttttagagctagaaatagcaagttaaaataaggctagtccgttatcaacttgaaaaagtggcaccgagtcggtgctttt

SEQ ID NO: 1395 - RNA, 100 nt, synthetic construct; identical to SEQ ID NO: 1394
  source 1..100: mol_type = other RNA

SEQ ID NO: 1396 - RNA, 100 nt, synthetic construct; identical to SEQ ID NO: 1394
  source 1..100: mol_type = other RNA

SEQ ID NO: 1397 - RNA, 100 nt, synthetic construct; identical to SEQ ID NO: 1394
  source 1..100: mol_type = other RNA

SEQ ID NO: 1398 - RNA, 100 nt, synthetic construct
  source 1..100: mol_type = other RNA
ccccatggcgttggaaggcagttttagagctagaaatagcaagttaaaataaggctagtccgttatcaacttgaaaaagtggcaccgagtcggtgctttt

SEQ ID NO: 1399 - RNA, 100 nt, synthetic construct; identical to SEQ ID NO: 1398
  source 1..100: mol_type = other RNA

SEQ ID NO: 1400 - RNA, 100 nt, synthetic construct; identical to SEQ ID NO: 1398
  source 1..100: mol_type = other RNA

SEQ ID NO: 1401 - RNA, 100 nt, synthetic construct; identical to SEQ ID NO: 1398
  source 1..100: mol_type = other RNA

SEQ ID NO: 1402 - RNA, 100 nt, synthetic construct; identical to SEQ ID NO: 1398
  source 1..100: mol_type = other RNA

SEQ ID NO: 1403 - RNA, 100 nt, synthetic construct; identical to SEQ ID NO: 1398
  source 1..100: mol_type = other RNA

SEQ ID NO: 1404 - RNA, 100 nt, synthetic construct; identical to SEQ ID NO: 1398
  source 1..100: mol_type = other RNA

SEQ ID NO: 1405 - RNA, 100 nt, synthetic construct; identical to SEQ ID NO: 1398
  source 1..100: mol_type = other RNA

SEQ ID NO: 1406 - RNA, 100 nt, synthetic construct
  source 1..100: mol_type = other RNA
ctccccatggcgttggaagggttttagagctagaaatagcaagttaaaataaggctagtccgttatcaacttgaaaaagtggcaccgagtcggtgctttt

SEQ ID NO: 1407 - RNA, 100 nt, synthetic construct; identical to SEQ ID NO: 1406
  source 1..100: mol_type = other RNA

SEQ ID NO: 1408 - RNA, 100 nt, synthetic construct; identical to SEQ ID NO: 1406
  source 1..100: mol_type = other RNA

SEQ ID NO: 1409 - RNA, 119 nt, synthetic construct
  source 1..119: mol_type = other RNA
gttctgtcttttggtcaggacaaccgtctagctataagtgctgcagggtgtgagaaactcctattgctggacgatgtctcttacgaggcattagcacctccccatggcgttggaaggca

SEQ ID NO: 1410 - RNA, 100 nt, synthetic construct
  source 1..100: mol_type = other RNA
gagattgctccccatggcgtgttttagagctagaaatagcaagttaaaataaggctagtccgttatcaacttgaaaaagtggcaccgagtcggtgctttt

SEQ ID NO: 1411 - RNA, 100 nt, synthetic construct
  source 1..100: mol_type = other RNA
tccccatggcgttggaaggcgttttagagctagaaatagcaagttaaaataaggctagtccgttatcaacttgaaaaagtggcaccgagtcggtgctttt

SEQ ID NO: 1412 - RNA, 100 nt, synthetic construct; identical to SEQ ID NO: 1411
  source 1..100: mol_type = other RNA

SEQ ID NO: 1413 - RNA, 100 nt, synthetic construct; identical to SEQ ID NO: 1411
  source 1..100: mol_type = other RNA

SEQ ID NO: 1414 - RNA, 100 nt, synthetic construct; identical to SEQ ID NO: 1411
  source 1..100: mol_type = other RNA

SEQ ID NO: 1415 - RNA, 100 nt, synthetic construct; identical to SEQ ID NO: 1411
  source 1..100: mol_type = other RNA

SEQ ID NO: 1416 - RNA, 100 nt, synthetic construct; identical to SEQ ID NO: 1411
  source 1..100: mol_type = other RNA

SEQ ID NO: 1417 - RNA, 100 nt, synthetic construct; identical to SEQ ID NO: 1411
  source 1..100: mol_type = other RNA

SEQ ID NO: 1418 - RNA, 100 nt, synthetic construct; identical to SEQ ID NO: 1411
  source 1..100: mol_type = other RNA

SEQ ID NO: 1419 - RNA, 100 nt, synthetic construct; identical to SEQ ID NO: 1411
  source 1..100: mol_type = other RNA

SEQ ID NO: 1420 - RNA, 100 nt, synthetic construct; identical to SEQ ID NO: 1411
  source 1..100: mol_type = other RNA

SEQ ID NO: 1421 - RNA, 100 nt, synthetic construct; identical to SEQ ID NO: 1411
  source 1..100: mol_type = other RNA

SEQ ID NO: 1422 - RNA, 100 nt, synthetic construct
  source 1..100: mol_type = other RNA
tgctccccatggcgttggaagttttagagctagaaatagcaagttaaaataaggctagtccgttatcaacttgaaaaagtggcaccgagtcggtgctttt

SEQ ID NO: 1423 - RNA, 100 nt, synthetic construct; identical to SEQ ID NO: 1422
  source 1..100: mol_type = other RNA

SEQ ID NO: 1424 - RNA, 100 nt, synthetic construct; identical to SEQ ID NO: 1422
  source 1..100: mol_type = other RNA

SEQ ID NO: 1425 - RNA, 100 nt, synthetic construct; identical to SEQ ID NO: 1422
  source 1..100: mol_type = other RNA

SEQ ID NO: 1426 - RNA, 100 nt, synthetic construct; identical to SEQ ID NO: 1422
  source 1..100: mol_type = other RNA

SEQ ID NO: 1427 - RNA, 100 nt, synthetic construct; identical to SEQ ID NO: 1422
  source 1..100: mol_type = other RNA

SEQ ID NO: 1428 - RNA, 100 nt, synthetic construct; identical to SEQ ID NO: 1422
  source 1..100: mol_type = other RNA

SEQ ID NO: 1429 - RNA, 100 nt, synthetic construct; identical to SEQ ID NO: 1422
  source 1..100: mol_type = other RNA

SEQ ID NO: 1430 - RNA, 100 nt, synthetic construct; identical to SEQ ID NO: 1422
  source 1..100: mol_type = other RNA

SEQ ID NO: 1431 - RNA, 100 nt, synthetic construct
  source 1..100: mol_type = other RNA
ttgctccccatggcgttggagttttagagctagaaatagcaagttaaaataaggctagtccgttatcaacttgaaaaagtggcaccgagtcggtgctttt

SEQ ID NO: 1432 - RNA, 100 nt, synthetic construct; identical to SEQ ID NO: 1431
  source 1..100: mol_type = other RNA

SEQ ID NO: 1433 - RNA, 100 nt, synthetic construct; identical to SEQ ID NO: 1431
  source 1..100: mol_type = other RNA

SEQ ID NO: 1434 - RNA, 100 nt, synthetic construct; identical to SEQ ID NO: 1431
  source 1..100: mol_type = other RNA

SEQ ID NO: 1435 - RNA, 100 nt, synthetic construct; identical to SEQ ID NO: 1431
  source 1..100: mol_type = other RNA

SEQ ID NO: 1436 - RNA, 100 nt, synthetic construct; identical to SEQ ID NO: 1431
  source 1..100: mol_type = other RNA

SEQ ID NO: 1437 - RNA, 100 nt, synthetic construct; identical to SEQ ID NO: 1431
  source 1..100: mol_type = other RNA

SEQ ID NO: 1438 - RNA, 100 nt, synthetic construct; identical to SEQ ID NO: 1240
  source 1..100: mol_type = other RNA

SEQ ID NO: 1439 - RNA, 100 nt, synthetic construct; identical to SEQ ID NO: 1172
  source 1..100: mol_type = other RNA

SEQ ID NO: 1440 - RNA, 100 nt, synthetic construct; identical to SEQ ID NO: 1230
  source 1..100: mol_type = other RNA

SEQ ID NO: 1441 - RNA, 100 nt, synthetic construct; identical to SEQ ID NO: 1182
  source 1..100: mol_type = other RNA

SEQ ID NO: 1442 - RNA, 100 nt, synthetic construct; identical to SEQ ID NO: 1251
  source 1..100: mol_type = other RNA

SEQ ID NO: 1443 - RNA, 100 nt, synthetic construct; identical to SEQ ID NO: 1328
  source 1..100: mol_type = other RNA

SEQ ID NO: 1444 - RNA, 100 nt, synthetic construct; identical to SEQ ID NO: 1212
  source 1..100: mol_type = other RNA

SEQ ID NO: 1445 - RNA, 100 nt, synthetic construct; identical to SEQ ID NO: 1318
  source 1..100: mol_type = other RNA

SEQ ID NO: 1446 - RNA, 100 nt, synthetic construct; identical to SEQ ID NO: 1294
  source 1..100: mol_type = other RNA

SEQ ID NO: 1447 - RNA, 100 nt, synthetic construct; identical to SEQ ID NO: 1154
  source 1..100: mol_type = other RNA

SEQ ID NO: 1448 - RNA, 100 nt, synthetic construct; identical to SEQ ID NO: 1132
  source 1..100: mol_type = other RNA

SEQ ID NO: 1449 - RNA, 100 nt, synthetic construct; identical to SEQ ID NO: 1192
  source 1..100: mol_type = other RNA

SEQ ID NO: 1450 - RNA, 100 nt, synthetic construct; identical to SEQ ID NO: 1221
  source 1..100: mol_type = other RNA

SEQ ID NO: 1451 - RNA, 109 nt, synthetic construct; identical to SEQ ID NO: 1211
  source 1..109: mol_type = other RNA

SEQ ID NO: 1452 - RNA, 109 nt, synthetic construct; identical to SEQ ID NO: 1267
  source 1..109: mol_type = other RNA

SEQ ID NO: 1453 - RNA, 100 nt, synthetic construct; identical to SEQ ID NO: 1422
  source 1..100: mol_type = other RNA

SEQ ID NO: 1454 - RNA, 100 nt, synthetic construct; identical to SEQ ID NO: 1431
  source 1..100: mol_type = other RNA

SEQ ID NO: 1455 - RNA, 100 nt, synthetic construct; identical to SEQ ID NO: 1410
  source 1..100: mol_type = other RNA

SEQ ID NO: 1456 - RNA, 100 nt, synthetic construct; identical to SEQ ID NO: 1398
  source 1..100: mol_type = other RNA

SEQ ID NO: 1457 - RNA, 100 nt, synthetic construct; identical to SEQ ID NO: 1390
  source 1..100: mol_type = other RNA

SEQ ID NO: 1458 - RNA, 100 nt, synthetic construct; identical to SEQ ID NO: 1388
  source 1..100: mol_type = other RNA

SEQ ID NO: 1459 - RNA, 100 nt, synthetic construct; identical to SEQ ID NO: 449
  source 1..100: mol_type = other RNA

SEQ ID NO: 1460 - RNA, 100 nt, synthetic construct; identical to SEQ ID NO: 449
  source 1..100: mol_type = other RNA

SEQ ID NO: 1461 - RNA, 100 nt, synthetic construct; identical to SEQ ID NO: 449
  source 1..100: mol_type = other RNA

SEQ ID NO: 1462 - RNA, 100 nt, synthetic construct; identical to SEQ ID NO: 449
  source 1..100: mol_type = other RNA

SEQ ID NO: 1463 - protein, 19 aa, synthetic construct
CKRTADGSEFESPKKKRKV

SEQ ID NO: 1464 - RNA, 106 nt, synthetic construct
  source 1..106: mol_type = other RNA
cctcagatgtctatgtgtttgttttagagccggcggaaacgccggcaagttaaaataaggctagtccgttatcaacttgaaaaagtggcaccgagtcggtgctttt

SEQ ID NO: 1465 - RNA, 106 nt, synthetic construct; identical to SEQ ID NO: 1464
  source 1..106: mol_type = other RNA

SEQ ID NO: 1466 - RNA, 106 nt, synthetic construct; identical to SEQ ID NO: 1464
  source 1..106: mol_type = other RNA

SEQ ID NO: 1467 - RNA, 100 nt, synthetic construct; identical to SEQ ID NO: 454
  source 1..100: mol_type = other RNA

SEQ ID NO: 1468 - RNA, 100 nt, synthetic construct; identical to SEQ ID NO: 454
  source 1..100: mol_type = other RNA

SEQ ID NO: 1469 - RNA, 100 nt, synthetic construct; identical to SEQ ID NO: 454
  source 1..100: mol_type = other RNA

SEQ ID NO: 1470 - RNA, 100 nt, synthetic construct; identical to SEQ ID NO: 454
  source 1..100: mol_type = other RNA

SEQ ID NO: 1471 - RNA, 106 nt, synthetic construct
  source 1..106: mol_type = other RNA
tctcacctctgcaagtattggttttagagccggcggaaacgccggcaagttaaaataaggctagtccgttatcaacttgaaaaagtggcaccgagtcggtgctttt

SEQ ID NO: 1472 - RNA, 106 nt, synthetic construct; identical to SEQ ID NO: 1471
  source 1..106: mol_type = other RNA

SEQ ID NO: 1473 - RNA, 106 nt, synthetic construct
  source 1..106: mol_type = other RNA
tgtcacctctgcaagtattggttttagagccggcggaaacgccggcaagttaaaataaggctagtccgttatcaacttgaaaaagtggcaccgagtcggtgctttt

SEQ ID NO: 1474 - RNA, 101 nt, synthetic construct; identical to SEQ ID NO: 460
  source 1..101: mol_type = other RNA

SEQ ID NO: 1475 - RNA, 101 nt, synthetic construct; identical to SEQ ID NO: 460
  source 1..101: mol_type = other RNA

SEQ ID NO: 1476 - RNA, 101 nt, synthetic construct; identical to SEQ ID NO: 460
  source 1..101: mol_type = other RNA

SEQ ID NO: 1477 - RNA, 101 nt, synthetic construct; identical to SEQ ID NO: 460
  source 1..101: mol_type = other RNA

SEQ ID NO: 1478 - RNA, 107 nt, synthetic construct
  source 1..107: mol_type = other RNA
tgcttacaatgactgagatctgttttagagccggcggaaacgccggcaagttaaaataaggctagtccgttatcaacttgaaaaagtggcaccgagtcggtgctttt

SEQ ID NO: 1479 - RNA, 107 nt, synthetic construct; identical to SEQ ID NO: 1478
  source 1..107: mol_type = other RNA

SEQ ID NO: 1480 - RNA, 107 nt, synthetic construct; identical to SEQ ID NO: 1478
  source 1..107: mol_type = other RNA

SEQ ID NO: 1481 - RNA, 101 nt, synthetic construct; identical to SEQ ID NO: 465
  source 1..101: mol_type = other RNA

SEQ ID NO: 1482 - RNA, 101 nt, synthetic construct; identical to SEQ ID NO: 465
  source 1..101: mol_type = other RNA

SEQ ID NO: 1483 - DNA, 19 bp, synthetic construct
  source 1..19: mol_type = other DNA
ctcagatgtctatgtgttt

SEQ ID NO: 1484 - DNA, 20 bp, synthetic construct
  source 1..20: mol_type = other DNA
cctcagatgtctatgtgttt

SEQ ID NO: 1485 - DNA, 21 bp, synthetic construct
  source 1..21: mol_type = other DNA
ccctcagatgtctatgtgttt

SEQ ID NO: 1486 - DNA, 22 bp, synthetic construct
  source 1..22: mol_type = other DNA
tccctcagatgtctatgtgttt

SEQ ID NO: 1487 - DNA, 23 bp, synthetic construct
  source 1..23: mol_type = other DNA
atccctcagatgtctatgtgttt

SEQ ID NO: 1488 - DNA, 19 bp, synthetic construct
  source 1..19: mol_type = other DNA
ctcacctctgcaagtattg

SEQ ID NO: 1489 - DNA, 20 bp, synthetic construct
  source 1..20: mol_type = other DNA
tctcacctctgcaagtattg

SEQ ID NO: 1490 - DNA, 21 bp, synthetic construct
  source 1..21: mol_type = other DNA
ctctcacctctgcaagtattg

SEQ ID NO: 1491 - DNA, 22 bp, synthetic construct
  source 1..22: mol_type = other DNA
tctctcacctctgcaagtattg

SEQ ID NO: 1492 - DNA, 23 bp, synthetic construct
  source 1..23: mol_type = other DNA
ttctctcacctctgcaagtattg

SEQ ID NO: 1493 - DNA, 19 bp, synthetic construct
  source 1..19: mol_type = other DNA
cttacaatgactgagatct

SEQ ID NO: 1494 - DNA, 20 bp, synthetic construct
  source 1..20: mol_type = other DNA
gcttacaatgactgagatct

SEQ ID NO: 1495 - DNA, 21 bp, synthetic construct
  source 1..21: mol_type = other DNA
tgcttacaatgactgagatct

SEQ ID NO: 1496 - DNA, 22 bp, synthetic construct
  source 1..22: mol_type = other DNA
gtgcttacaatgactgagatct

SEQ ID NO: 1497 - DNA, 23 bp, synthetic construct
  source 1..23: mol_type = other DNA
tgtgcttacaatgactgagatct

SEQ ID NO: 1498 - DNA, 19 bp, synthetic construct
  source 1..19: mol_type = other DNA
cttacagtgactgagatct

SEQ ID NO: 1499 - DNA, 20 bp, synthetic construct
  source 1..20: mol_type = other DNA
gcttacagtgactgagatct

SEQ ID NO: 1500 - DNA, 21 bp, synthetic construct
  source 1..21: mol_type = other DNA
tgcttacagtgactgagatct

SEQ ID NO: 1501 - DNA, 22 bp, synthetic construct
  source 1..22: mol_type = other DNA
gtgcttacagtgactgagatct

SEQ ID NO: 1502 - DNA, 23 bp, synthetic construct
  source 1..23: mol_type = other DNA
tgtgcttacagtgactgagatct

SEQ ID NO: 1503 - DNA, 22 bp, synthetic construct
  source 1..22: mol_type = other DNA
ctcagatgtctatgtgtttggg

SEQ ID NO: 1504 - DNA, 23 bp, synthetic construct
  source 1..23: mol_type = other DNA
cctcagatgtctatgtgtttggg

SEQ ID NO: 1505 - DNA, 24 bp, synthetic construct
  source 1..24: mol_type = other DNA
ccctcagatgtctatgtgtttggg

SEQ ID NO: 1506 - DNA, 25 bp, synthetic construct
  source 1..25: mol_type = other DNA
tccctcagatgtctatgtgtttggg

SEQ ID NO: 1507 - DNA, 26 bp, synthetic construct
  source 1..26: mol_type = other DNA
atccctcagatgtctatgtgtttggg

SEQ ID NO: 1508 - DNA, 22 bp, synthetic construct
  source 1..22: mol_type = other DNA
ctcacctctgcaagtattgggg

SEQ ID NO: 1509 - DNA, 23 bp, synthetic construct
  source 1..23: mol_type = other DNA
tctcacctctgcaagtattgggg

SEQ ID NO: 1510 - DNA, 24 bp, synthetic construct
  source 1..24: mol_type = other DNA
ctctcacctctgcaagtattgggg

SEQ ID NO: 1511 - DNA, 25 bp, synthetic construct
  source 1..25: mol_type = other DNA
tctctcacctctgcaagtattgggg

SEQ ID NO: 1512 - DNA, 26 bp, synthetic construct
  source 1..26: mol_type = other DNA
ttctctcacctctgcaagtattgggg

SEQ ID NO: 1513 - DNA, 22 bp, synthetic construct
  source 1..22: mol_type = other DNA
cttacaatgactgagatcttgg

SEQ ID NO: 1514 - DNA, 23 bp, synthetic construct
  source 1..23: mol_type = other DNA
gcttacaatgactgagatcttgg

SEQ ID NO: 1515 - DNA, 24 bp, synthetic construct
  source 1..24: mol_type = other DNA
tgcttacaatgactgagatcttgg

SEQ ID NO: 1516 - DNA, 25 bp, synthetic construct
  source 1..25: mol_type = other DNA
gtgcttacaatgactgagatcttgg

SEQ ID NO: 1517 - DNA, 26 bp, synthetic construct
  source 1..26: mol_type = other DNA
tgtgcttacaatgactgagatcttgg

SEQ ID NO: 1518 - DNA, 22 bp, synthetic construct
  source 1..22: mol_type = other DNA
cttacagtgactgagatcttgg

SEQ ID NO: 1519 - DNA, 23 bp, synthetic construct
  source 1..23: mol_type = other DNA
gcttacagtgactgagatcttgg

SEQ ID NO: 1520 - DNA, 24 bp, synthetic construct
  source 1..24: mol_type = other DNA
tgcttacagtgactgagatcttgg

SEQ ID NO: 1521 - DNA, 25 bp, synthetic construct
  source 1..25: mol_type = other DNA
gtgcttacagtgactgagatcttgg

SEQ ID NO: 1522 - DNA, 26 bp, synthetic construct
  source 1..26: mol_type = other DNA
tgtgcttacagtgactgagatcttgg

SEQ ID NO: 1523 - RNA, 19 nt, synthetic construct
  source 1..19: mol_type = other RNA
ctcagatgtctatgtgttt

SEQ ID NO: 1524 - RNA, 20 nt, synthetic construct
  source 1..20: mol_type = other RNA
cctcagatgtctatgtgttt

SEQ ID NO: 1525 - RNA, 21 nt, synthetic construct
  source 1..21: mol_type = other RNA
ccctcagatgtctatgtgttt

SEQ ID NO: 1526 - RNA, 22 nt, synthetic construct
  source 1..22: mol_type = other RNA
tccctcagatgtctatgtgttt

SEQ ID NO: 1527 - RNA, 23 nt, synthetic construct
  source 1..23: mol_type = other RNA
atccctcagatgtctatgtgttt

SEQ ID NO: 1528 - RNA, 19 nt, synthetic construct
  source 1..19: mol_type = other RNA
ctcacctctgcaagtattg

SEQ ID NO: 1529 - RNA, 20 nt, synthetic construct
  source 1..20: mol_type = other RNA
tctcacctctgcaagtattg

SEQ ID NO: 1530 - RNA, 21 nt, synthetic construct
  source 1..21: mol_type = other RNA
ctctcacctctgcaagtattg

SEQ ID NO: 1531 - RNA, 22 nt, synthetic construct
  source 1..22: mol_type = other RNA
tctctcacctctgcaagtattg

SEQ ID NO: 1532 - RNA, 23 nt, synthetic construct
  source 1..23: mol_type = other RNA
ttctctcacctctgcaagtattg

SEQ ID NO: 1533 - RNA, 19 nt, synthetic construct
  source 1..19: mol_type = other RNA
cttacaatgactgagatct

SEQ ID NO: 1534 - RNA, 20 nt, synthetic construct
  source 1..20: mol_type = other RNA
gcttacaatgactgagatct

SEQ ID NO: 1535 - RNA, 21 nt, synthetic construct
  source 1..21: mol_type = other RNA
tgcttacaatgactgagatct

SEQ ID NO: 1536 - RNA, 22 nt, synthetic construct
  source 1..22: mol_type = other RNA
gtgcttacaatgactgagatct

SEQ ID NO: 1537 - RNA, 23 nt, synthetic construct
  source 1..23: mol_type = other RNA
tgtgcttacaatgactgagatct

SEQ ID NO: 1538 - RNA, 19 nt, synthetic construct
  source 1..19: mol_type = other RNA
cttacagtgactgagatct

SEQ ID NO: 1539 - RNA, 20 nt, synthetic construct
  source 1..20: mol_type = other RNA
gcttacagtgactgagatct

SEQ ID NO: 1540 - RNA, 21 nt, synthetic construct
  source 1..21: mol_type = other RNA
tgcttacagtgactgagatct

SEQ ID NO: 1541 - RNA, 22 nt, synthetic construct
  source 1..22: mol_type = other RNA
gtgcttacagtgactgagatct

SEQ ID NO: 1542 - RNA, 23 nt, synthetic construct
  source 1..23: mol_type = other RNA
tgtgcttacagtgactgagatct

SEQ ID NO: 1543 - DNA, 23 bp, synthetic construct
  source 1..23: mol_type = other DNA
cagaatcacctgcaaggagagga

SEQ ID NO: 1544 - DNA, 23 bp, synthetic construct
  source 1..23: mol_type = other DNA
ccagaatcacctgcaaggagagg

SEQ ID NO: 1545 - DNA, 27 bp, synthetic construct
  source 1..27: mol_type = other DNA
gcccaccttccttgtgccaatggggat

SEQ ID NO: 1546 - DNA, 27 bp, synthetic construct
  source 1..27: mol_type = other DNA
ctggctgcccaccttccttgtgccaat

SEQ ID NO: 1547 - DNA, 27 bp, synthetic construct
  source 1..27: mol_type = other DNA
tgctgtctgatccatctagcaccaggt

SEQ ID NO: 1548 - DNA, 27 bp, synthetic construct
  source 1..27: mol_type = other DNA
acagcagcacattgtttcactgtggat

SEQ ID NO: 1549 - DNA, 23 bp, synthetic construct
  source 1..23: mol_type = other DNA
gcagcacattgtttcactgtgga

SEQ ID NO: 1550 - DNA, 23 bp, synthetic construct
  source 1..23: mol_type = other DNA
gcacattgtttcactgtggatga

SEQ ID NO: 1551 - DNA, 23 bp, synthetic construct
  source 1..23: mol_type = other DNA
acgttcgccgctgggagccacgc

SEQ ID NO: 1552 - DNA, 23 bp, synthetic construct
  source 1..23: mol_type = other DNA
caatgctgtctgatccatctagc

SEQ ID NO: 1553 - DNA, 23 bp, synthetic construct
  source 1..23: mol_type = other DNA
gatggatcagacagcattggggc

SEQ ID NO: 1554 - DNA, 23 bp, synthetic construct
  source 1..23: mol_type = other DNA
gatcagacagcattggggccagc

SEQ ID NO: 1555 - DNA, 23 bp, synthetic construct
  source 1..23: mol_type = other DNA
tcagggactaacaccaagaaggc

SEQ ID NO: 1556 - DNA, 23 bp, synthetic construct
  source 1..23: mol_type = other DNA
ccaccttccttgtgccaatgggg

SEQ ID NO: 1557 - DNA, 23 bp, synthetic construct
  source 1..23: mol_type = other DNA
cccaccttccttgtgccaatggg

SEQ ID NO: 1558 - DNA, 23 bp, synthetic construct
  source 1..23: mol_type = other DNA
gcccaccttccttgtgccaatgg

SEQ ID NO: 1559 - DNA, 23 bp, synthetic construct
  source 1..23: mol_type = other DNA
gtcagggactaacaccaagaagg

SEQ ID NO: 1560 - DNA, 23 bp, synthetic construct
  source 1..23: mol_type = other DNA
agcagcacattgtttcactgtgg

SEQ ID NO: 1561 - DNA, 27 bp, synthetic construct
  source 1..27: mol_type = other DNA
gcccaccttccttgtgccaatggggat

SEQ ID NO: 1562 - DNA, 27 bp, synthetic construct
  source 1..27: mol_type = other DNA
acagcagcacattgtttcactgtggat

SEQ ID NO: 1563 - DNA, 27 bp, synthetic construct
  source 1..27: mol_type = other DNA
gcccaccttccttgtgccaatggggat

SEQ ID NO: 1564 - DNA, 27 bp, synthetic construct
  source 1..27: mol_type = other DNA
ctggctgcccaccttccttgtgccaat

SEQ ID NO: 1565 - DNA, 27 bp, synthetic construct
  source 1..27: mol_type = other DNA
cgttcgccgctgggagccacgcagggt

SEQ ID NO: 1566 - DNA, 27 bp, synthetic construct
  source 1..27: mol_type = other DNA
tcttccgcttctgttgttcccctgggt

SEQ ID NO: 1567 - DNA, 27 bp, synthetic construct
  source 1..27: mol_type = other DNA
tgctgtctgatccatctagcaccaggt

SEQ ID NO: 1568 - DNA, 27 bp, synthetic construct
  source 1..27: mol_type = other DNA
aacgtcatagtcataaaattcaggaat

SEQ ID NO: 1569 - DNA, 27 bp, synthetic construct
  source 1..27: mol_type = other DNA
acagcagcacattgtttcactgtggat

SEQ ID NO: 1570 - DNA, 27 bp, synthetic construct
  source 1..27: mol_type = other DNA
tgcaggtgattctggcggccccttgat

SEQ ID NO: 1571 - DNA, 23 bp, synthetic construct
  source 1..23: mol_type = other DNA
cccaggggaacaacagaagcgga

SEQ ID NO: 1572 - DNA, 23 bp, synthetic construct
  source 1..23: mol_type = other DNA
aggggaacaacagaagcggaaga

SEQ ID NO: 1573 - DNA, 23 bp, synthetic construct
  source 1..23: mol_type = other DNA
cagaagcggaagatcgtcctgga

SEQ ID NO: 1574 - DNA, 23 bp, synthetic construct
  source 1..23: mol_type = other DNA
gccagatgaaagccagtctctga

SEQ ID NO: 1575 - DNA, 23 bp, synthetic construct
  source 1..23: mol_type = other DNA
acagaagcggaagatcgtcctgg

SEQ ID NO: 1576 - DNA, 23 bp, synthetic construct
  source 1..23: mol_type = other DNA
agatggatcagacagcattgggg

SEQ ID NO: 1577 - DNA, 27 bp, synthetic construct
  source 1..27: mol_type = other DNA
ctgccagatgaaagccagtctctgagt

SEQ ID NO: 1578 - DNA, 27 bp, synthetic construct
  source 1..27: mol_type = other DNA
cccaggggaacaacagaagcggaagat

SEQ ID NO: 1579 - DNA, 27 bp, synthetic construct
  source 1..27: mol_type = other DNA
ctgccagatgaaagccagtctctgagt

SEQ ID NO: 1580 - DNA, 23 bp, synthetic construct
  source 1..23: mol_type = other DNA
ttgttcccctgggtgccaggaga

SEQ ID NO: 1581 - DNA, 23 bp, synthetic construct
  source 1..23: mol_type = other DNA
tgatccatctagcaccaggtaga

SEQ ID NO: 1582 - DNA, 23 bp, synthetic construct
  source 1..23: mol_type = other DNA
accatcagtcatgaggatgatga

SEQ ID NO: 1583 - DNA, 23 bp, synthetic construct
  source 1..23: mol_type = other DNA
ctgaccatcagtcatgaggatga

SEQ ID NO: 1584 - DNA, 23 bp, synthetic construct
  source 1..23: mol_type = other DNA
ctttcatctggcagagaaggaga

SEQ ID NO: 1585 - DNA, 23 bp, synthetic construct
  source 1..23: mol_type = other DNA
gaatcacctgcaaggagaggaga

SEQ ID NO: 1586 - DNA, 23 bp, synthetic construct
  source 1..23: mol_type = other DNA
cagaatcacctgcaaggagagga

SEQ ID NO: 1587 - DNA, 23 bp, synthetic construct
  source 1..23: mol_type = other DNA
tcacctgcaaggagaggagaagc

SEQ ID NO: 1588 - DNA, 23 bp, synthetic construct
  source 1..23: mol_type = other DNA
tctcacctctgcaagtattgggg

SEQ ID NO: 1589 - DNA, 23 bp, synthetic construct
  source 1..23: mol_type = other DNA
ctctcacctctgcaagtattggg

SEQ ID NO: 1590 - DNA, 23 bp, synthetic construct
  source 1..23: mol_type = other DNA
tctctcacctctgcaagtattgg

SEQ ID NO: 1591 - DNA, 27 bp, synthetic construct
  source 1..27: mol_type = other DNA
tgttgttcccctgggtgccaggagagt

SEQ ID NO: 1592 - DNA, 27 bp, synthetic construct
  source 1..27: mol_type = other DNA
ggctttcatctggcagagaaggagaat

SEQ ID NO: 1593 - DNA, 27 bp, synthetic construct
  source 1..27: mol_type = other DNA
ttctctcacctctgcaagtattggggt

SEQ ID NO: 1594 - DNA, 27 bp, synthetic construct
  source 1..27: mol_type = other DNA
gaaagcttcggccacctcttgaggggt

SEQ ID NO: 1595 - DNA, 27 bp, synthetic construct
  source 1..27: mol_type = other DNA
tgttgttcccctgggtgccaggagagt

SEQ ID NO: 1596 - DNA, 27 bp, synthetic construct
  source 1..27: mol_type = other DNA
gtctgatccatctagcaccaggtagat

SEQ ID NO: 1597 - DNA, 27 bp, synthetic construct
  source 1..27: mol_type = other DNA
cttctgaccatcagtcatgaggatgat

SEQ ID NO: 1598 - DNA, 27 bp, synthetic construct
  source 1..27: mol_type = other DNA
ggctttcatctggcagagaaggagaat

SEQ ID NO: 1599 - DNA, 27 bp, synthetic construct
  source 1..27: mol_type = other DNA
ttctctcacctctgcaagtattggggt

SEQ ID NO: 1600 - RNA, 20 nt, synthetic construct
  source 1..20: mol_type = other RNA
cagaatcacctgcaaggaga

SEQ ID NO: 1601 - RNA, 20 nt, synthetic construct
  source 1..20: mol_type = other RNA
ccagaatcacctgcaaggag

SEQ ID NO: 1602 - RNA, 21 nt, synthetic construct
  source 1..21: mol_type = other RNA
gcccaccttccttgtgccaat

SEQ ID NO: 1603 - RNA, 21 nt, synthetic construct
  source 1..21: mol_type = other RNA
ctggctgcccaccttccttgt

SEQ ID NO: 1604 - RNA, 21 nt, synthetic construct
  source 1..21: mol_type = other RNA
tgctgtctgatccatctagca

SEQ ID NO: 1605 - RNA, 21 nt, synthetic construct
  source 1..21: mol_type = other RNA
acagcagcacattgtttcact

SEQ ID NO: 1606 - RNA, 20 nt, synthetic construct
  source 1..20: mol_type = other RNA
gcagcacattgtttcactgt

SEQ ID NO: 1607 - RNA, 20 nt, synthetic construct
  source 1..20: mol_type = other RNA
gcacattgtttcactgtgga

SEQ ID NO: 1608 - RNA, 20 nt, synthetic construct
  source 1..20: mol_type = other RNA
acgttcgccgctgggagcca

SEQ ID NO: 1609 - RNA, 20 nt, synthetic construct
  source 1..20: mol_type = other RNA
caatgctgtctgatccatct

SEQ ID NO: 1610 - RNA, 20 nt, synthetic construct
  source 1..20: mol_type = other RNA
gatggatcagacagcattgg

SEQ ID NO: 1611 - RNA, 20 nt, synthetic construct
  source 1..20: mol_type = other RNA
gatcagacagcattggggcc

SEQ ID NO: 1612 - RNA, 20 nt, synthetic construct
  source 1..20: mol_type = other RNA
tcagggactaacaccaagaa

SEQ ID NO: 1613 - RNA, 20 nt, synthetic construct
  source 1..20: mol_type = other RNA
ccaccttccttgtgccaatg

SEQ ID NO: 1614 - RNA, 20 nt, synthetic construct
  source 1..20: mol_type = other RNA
cccaccttccttgtgccaat

SEQ ID NO: 1615 - RNA, 20 nt, synthetic construct
  source 1..20: mol_type = other RNA
gcccaccttccttgtgccaa

SEQ ID NO: 1616 - RNA, 20 nt, synthetic construct
  source 1..20: mol_type = other RNA
gtcagggactaacaccaaga

SEQ ID NO: 1617 - RNA, 20 nt, synthetic construct
  source 1..20: mol_type = other RNA
agcagcacattgtttcactg

SEQ ID NO: 1618 - RNA, 21 nt, synthetic construct
  source 1..21: mol_type = other RNA
gcccaccttccttgtgccaat

SEQ ID NO: 1619 - RNA, 21 nt, synthetic construct
  source 1..21: mol_type = other RNA
acagcagcacattgtttcact

SEQ ID NO: 1620 - RNA, 21 nt, synthetic construct
  source 1..21: mol_type = other RNA
gcccaccttccttgtgccaat

SEQ ID NO: 1621 - RNA, 21 nt, synthetic construct
  source 1..21: mol_type = other RNA
ctggctgcccaccttccttgt

SEQ ID NO: 1622 - RNA, 21 nt, synthetic construct
  source 1..21: mol_type = other RNA
cgttcgccgctgggagccacg

SEQ ID NO: 1623 - RNA, 21 nt, synthetic construct
  source 1..21: mol_type = other RNA
tcttccgcttctgttgttccc

SEQ ID NO: 1624 - RNA, 21 nt, synthetic construct
  source 1..21: mol_type = other RNA
tgctgtctgatccatctagca

SEQ ID NO: 1625 - RNA, 21 nt, synthetic construct
  source 1..21: mol_type = other RNA
aacgtcatagtcataaaattc

SEQ ID NO: 1626 - RNA, 21 nt, synthetic construct
  source 1..21: mol_type = other RNA
acagcagcacattgtttcact

SEQ ID NO: 1627 - RNA, 21 nt, synthetic construct
  source 1..21: mol_type = other RNA
tgcaggtgattctggcggccc

SEQ ID NO: 1628 - RNA, 20 nt, synthetic construct
  source 1..20: mol_type = other RNA
cccaggggaacaacagaagc

SEQ ID NO: 1629 - RNA, 20 nt, synthetic construct
  source 1..20: mol_type = other RNA
aggggaacaacagaagcgga

SEQ ID NO: 1630 - RNA, 20 nt, synthetic construct
  source 1..20: mol_type = other RNA
cagaagcggaagatcgtcct

SEQ ID NO: 1631 - RNA, 20 nt, synthetic construct
  source 1..20: mol_type = other RNA
gccagatgaaagccagtctc

SEQ ID NO: 1632 - RNA, 20 nt, synthetic construct
  source 1..20: mol_type = other RNA
acagaagcggaagatcgtcc

SEQ ID NO: 1633 - RNA, 20 nt, synthetic construct
  source 1..20: mol_type = other RNA
agatggatcagacagcattg

SEQ ID NO: 1634 - RNA, 21 nt, synthetic construct
  source 1..21: mol_type = other RNA
ctgccagatgaaagccagtct

SEQ ID NO: 1635 - RNA, 21 nt, synthetic construct
  source 1..21: mol_type = other RNA
cccaggggaacaacagaagcg

SEQ ID NO: 1636 - RNA, 21 nt, synthetic construct
  source 1..21: mol_type = other RNA
ctgccagatgaaagccagtct

SEQ ID NO: 1637 - RNA, 20 nt, synthetic construct
  source 1..20: mol_type = other RNA
ttgttcccctgggtgccagg

SEQ ID NO: 1638 - RNA, 20 nt, synthetic construct
  source 1..20: mol_type = other RNA
tgatccatctagcaccaggt

SEQ ID NO: 1639 - RNA, 20 nt, synthetic construct
  source 1..20: mol_type = other RNA
accatcagtcatgaggatga

SEQ ID NO: 1640 - RNA, 20 nt, synthetic construct
  source 1..20: mol_type = other RNA
ctgaccatcagtcatgagga

SEQ ID NO: 1641 - RNA, 20 nt, synthetic construct
  source 1..20: mol_type = other RNA
ctttcatctggcagagaagg

SEQ ID NO: 1642 - RNA, 20 nt, synthetic construct
  source 1..20: mol_type = other RNA
gaatcacctgcaaggagagg

SEQ ID NO: 1643 - RNA, 20 nt, synthetic construct
  source 1..20: mol_type = other RNA
cagaatcacctgcaaggaga

SEQ ID NO: 1644 - RNA, 20 nt, synthetic construct
  source 1..20: mol_type = other RNA
tcacctgcaaggagaggaga

SEQ ID NO: 1645 - RNA, 20 nt, synthetic construct
  source 1..20: mol_type = other RNA
tctcacctctgcaagtattg

SEQ ID NO: 1646 - RNA, 20 nt, synthetic construct
  source 1..20: mol_type = other RNA
ctctcacctctgcaagtatt

SEQ ID NO: 1647 - RNA, 20 nt, synthetic construct
  source 1..20: mol_type = other RNA
tctctcacctctgcaagtat

SEQ ID NO: 1648 - RNA, 21 nt, synthetic construct
  source 1..21: mol_type = other RNA
tgttgttcccctgggtgccag

SEQ ID NO: 1649 - RNA, 21 nt, synthetic construct
  source 1..21: mol_type = other RNA
ggctttcatctggcagagaag

SEQ ID NO: 1650 - RNA, 21 nt, synthetic construct
  source 1..21: mol_type = other RNA
ttctctcacctctgcaagtat

SEQ ID NO: 1651 - RNA, 21 nt, synthetic construct
  source 1..21: mol_type = other RNA
gaaagcttcggccacctcttg

SEQ ID NO: 1652 - RNA, 21 nt, synthetic construct
  source 1..21: mol_type = other RNA
tgttgttcccctgggtgccag

SEQ ID NO: 1653 - RNA, 21 nt, synthetic construct
  source 1..21: mol_type = other RNA
gtctgatccatctagcaccag

SEQ ID NO: 1654 - RNA, 21 nt, synthetic construct
  source 1..21: mol_type = other RNA
cttctgaccatcagtcatgag

SEQ ID NO: 1655 - RNA, 21 nt, synthetic construct
  source 1..21: mol_type = other RNA
ggctttcatctggcagagaag

SEQ ID NO: 1656 - RNA, 21 nt, synthetic construct
  source 1..21: mol_type = other RNA
ttctctcacctctgcaagtat

SEQ ID NO: 1657 - DNA, 23 bp, synthetic construct
  source 1..23: mol_type = other DNA
gtcagggactaacaccaagaagg

SEQ ID NO: 1658 - DNA, 23 bp, synthetic construct
  source 1..23: mol_type = other DNA
agcagcacattgtttcactgtgg

SEQ ID NO: 1659 - DNA, 23 bp, synthetic construct
  source 1..23: mol_type = other DNA
tgtctgatccatctagcaccagg

SEQ ID NO: 1660 - DNA, 23 bp, synthetic construct
  source 1..23: mol_type = other DNA
gcccaccttccttgtgccaatgg

SEQ ID NO: 1661 - DNA, 23 bp, synthetic construct
  source 1..23: mol_type = other DNA
cccaccttccttgtgccaatggg

SEQ ID NO: 1662 - DNA, 23 bp, synthetic construct
  source 1..23: mol_type = other DNA
ccaccttccttgtgccaatgggg

SEQ ID NO: 1663 - DNA, 23 bp, synthetic construct
  source 1..23: mol_type = other DNA
cgggcatccccattggcacaagg

SEQ ID NO: 1664 - DNA, 23 bp, synthetic construct
  source 1..23: mol_type = other DNA
catccccattggcacaaggaagg

SEQ ID NO: 1665 - DNA, 23 bp, synthetic construct
  source 1..23: mol_type = other DNA
acagaagcggaagatcgtcctgg

SEQ ID NO: 1666 - DNA, 23 bp, synthetic construct
  source 1..23: mol_type = other DNA
agatggatcagacagcattgggg

SEQ ID NO: 1667 - DNA, 23 bp, synthetic construct
  source 1..23: mol_type = other DNA
acgtcatagtcataaaattcagg

SEQ ID NO: 1668 - DNA, 23 bp, synthetic construct
  source 1..23: mol_type = other DNA
ttccgcttctgttgttcccctgg

SEQ ID NO: 1669 - DNA, 23 bp, synthetic construct
  source 1..23: mol_type = other DNA
gcagcacattgtttcactgtgga

SEQ ID NO: 1670 - DNA, 23 bp, synthetic construct
  source 1..23: mol_type = other DNA
gcacattgtttcactgtggatga

SEQ ID NO: 1671 - DNA, 23 bp, synthetic construct
  source 1..23: mol_type = other DNA
gccgccagaatcacctgcaagga

SEQ ID NO: 1672 - DNA, 23 bp, synthetic construct
  source 1..23: mol_type = other DNA
cgccagaatcacctgcaaggaga

SEQ ID NO: 1673 - DNA, 23 bp, synthetic construct
  source 1..23: mol_type = other DNA
tgatccatctagcaccaggtaga

SEQ ID NO: 1674 - DNA, 23 bp, synthetic construct
  source 1..23: mol_type = other DNA
gggcatccccattggcacaagga

SEQ ID NO: 1675 - DNA, 23 bp, synthetic construct
  source 1..23: mol_type = other DNA
cagaagcggaagatcgtcctgga

SEQ ID NO: 1676 - DNA, 23 bp, synthetic construct
  source 1..23: mol_type = other DNA
aggtgattctggcggccccttga

SEQ ID NO: 1677 - DNA, 23 bp, synthetic construct
  source 1..23: mol_type = other DNA
cgtcatagtcataaaattcagga

SEQ ID NO: 1678 - DNA, 23 bp, synthetic construct
  source 1..23: mol_type = other DNA
gatcagacagcattggggccagc

SEQ ID NO: 1679 - DNA, 23 bp, synthetic construct
  source 1..23: mol_type = other DNA
tcagggactaacaccaagaaggc

SEQ ID NO: 1680 - DNA, 23 bp, synthetic construct
  source 1..23: mol_type = other DNA
ctatgacgttgccctgatcaagc

SEQ ID NO: 1681 - DNA, 27 bp, synthetic construct
  source 1..27: mol_type = other DNA
acagcagcacattgtttcactgtggat

SEQ ID NO: 1682 - DNA, 27 bp, synthetic construct
  source 1..27: mol_type = other DNA
gcccaccttccttgtgccaatggggat

SEQ ID NO: 1683 - DNA, 27 bp, synthetic construct
  source 1..27: mol_type = other DNA
aacgtcatagtcataaaattcaggaat

SEQ ID NO: 1684 - DNA, 27 bp, synthetic construct
  source 1..27: mol_type = other DNA
tcttccgcttctgttgttcccctgggt

SEQ ID NO: 1685 - DNA, 27 bp, synthetic construct
  source 1..27: mol_type = other DNA
cgttcgccgctgggagccacgcagggt

SEQ ID NO: 1686 - DNA, 27 bp, synthetic construct
  source 1..27: mol_type = other DNA
gtctgatccatctagcaccaggtagat

SEQ ID NO: 1687 - DNA, 27 bp, synthetic construct
  source 1..27: mol_type = other DNA
gggcatccccattggcacaaggaaggt

SEQ ID NO: 1688 - DNA, 27 bp, synthetic construct
  source 1..27: mol_type = other DNA
aggtgattctggcggccccttgatagt

SEQ ID NO: 1689 - DNA, 23 bp, synthetic construct
  source 1..23: mol_type = other DNA
ctagatggatcagacagcattgg

SEQ ID NO: 1690 - DNA, 23 bp, synthetic construct
  source 1..23: mol_type = other DNA
tagatggatcagacagcattggg

SEQ ID NO: 1691 - DNA, 23 bp, synthetic construct
  source 1..23: mol_type = other DNA
tggctttcatctggcagagaagg

SEQ ID NO: 1692 - DNA, 23 bp, synthetic construct
  source 1..23: mol_type = other DNA
ctgttgttcccctgggtgccagg

SEQ ID NO: 1693 - DNA, 23 bp, synthetic construct
  source 1..23: mol_type = other DNA
aaagcttcggccacctcttgagg

SEQ ID NO: 1694 - DNA, 23 bp, synthetic construct
  source 1..23: mol_type = other DNA
aagcttcggccacctcttgaggg

SEQ ID NO: 1695 - DNA, 23 bp, synthetic construct
  source 1..23: mol_type = other DNA
agcttcggccacctcttgagggg

SEQ ID NO: 1696 - DNA, 23 bp, synthetic construct
  source 1..23: mol_type = other DNA
cgaagctttcctgtcttccctga

SEQ ID NO: 1697 - DNA, 23 bp, synthetic construct
  source 1..23: mol_type = other DNA
ggctttcatctggcagagaagga

SEQ ID NO: 1698 - DNA, 23 bp, synthetic construct
  source 1..23: mol_type = other DNA
tgttgttcccctgggtgccagga

SEQ ID NO: 1699 - DNA, 27 bp, synthetic construct
  source 1..27: mol_type = other DNA
gaaagcttcggccacctcttgaggggt

SEQ ID NO: 1700 - RNA, 20 nt, synthetic construct
  source 1..20: mol_type = other RNA
gtcagggactaacaccaaga

SEQ ID NO: 1701 - RNA, 20 nt, synthetic construct
  source 1..20: mol_type = other RNA
agcagcacattgtttcactg

SEQ ID NO: 1702 - RNA, 20 nt, synthetic construct
  source 1..20: mol_type = other RNA
tgtctgatccatctagcacc

SEQ ID NO: 1703 - RNA, 20 nt, synthetic construct
  source 1..20: mol_type = other RNA
gcccaccttccttgtgccaa

SEQ ID NO: 1704 - RNA, 20 nt, synthetic construct
  source 1..20: mol_type = other RNA
cccaccttccttgtgccaat

SEQ ID NO: 1705 - RNA, 20 nt, synthetic construct
  source 1..20: mol_type = other RNA
ccaccttccttgtgccaatg

SEQ ID NO: 1706 - RNA, 20 nt, synthetic construct
  source 1..20: mol_type = other RNA
cgggcatccccattggcaca

SEQ ID NO: 1707 - RNA, 20 nt, synthetic construct
  source 1..20: mol_type = other RNA
catccccattggcacaagga

SEQ ID NO: 1708 - RNA, 20 nt, synthetic construct
  source 1..20: mol_type = other RNA
acagaagcggaagatcgtcc

SEQ ID NO: 1709 - RNA, 20 nt, synthetic construct
  source 1..20: mol_type = other RNA
agatggatcagacagcattg

SEQ ID NO: 1710 - RNA, 20 nt, synthetic construct
  source 1..20: mol_type = other RNA
acgtcatagtcataaaattc

SEQ ID NO: 1711 - RNA, 20 nt, synthetic construct
  source 1..20: mol_type = other RNA
ttccgcttctgttgttcccc

SEQ ID NO: 1712 - RNA, 20 nt, synthetic construct
  source 1..20: mol_type = other RNA
gcagcacattgtttcactgt

SEQ ID NO: 1713 - RNA, 20 nt, synthetic construct
  source 1..20: mol_type = other RNA
gcacattgtttcactgtgga

SEQ ID NO: 1714 - RNA, 20 nt, synthetic construct
  source 1..20: mol_type = other RNA
gccgccagaatcacctgcaa

SEQ ID NO: 1715 - RNA, 20 nt, synthetic construct
  source 1..20: mol_type = other RNA
cgccagaatcacctgcaagg

SEQ ID NO: 1716 - RNA, 20 nt, synthetic construct
  source 1..20: mol_type = other RNA
tgatccatctagcaccaggt

SEQ ID NO: 1717 - RNA, 20 nt, synthetic construct
  source 1..20: mol_type = other RNA
gggcatccccattggcacaa

SEQ ID NO: 1718 - RNA, 20 nt, synthetic construct
  source 1..20: mol_type = other RNA
cagaagcggaagatcgtcct

SEQ ID NO: 1719 - RNA, 20 nt, synthetic construct
  source 1..20: mol_type = other RNA
aggtgattctggcggcccct

SEQ ID NO: 1720 - RNA, 20 nt, synthetic construct
  source 1..20: mol_type = other RNA
cgtcatagtcataaaattca

SEQ ID NO: 1721 - RNA, 20 nt, synthetic construct
  source 1..20: mol_type = other RNA
gatcagacagcattggggcc

SEQ ID NO: 1722 - RNA, 20 nt, synthetic construct
  source 1..20: mol_type = other RNA
tcagggactaacaccaagaa

SEQ ID NO: 1723 - RNA, 20 nt, synthetic construct
  source 1..20: mol_type = other RNA
ctatgacgttgccctgatca

SEQ ID NO: 1724 - RNA, 21 nt, synthetic construct
  source 1..21: mol_type = other RNA
acagcagcacattgtttcact

SEQ ID NO: 1725 - RNA, 21 nt, synthetic construct
  source 1..21: mol_type = other RNA
gcccaccttccttgtgccaat

SEQ ID NO: 1726 - RNA, 21 nt, synthetic construct
  source 1..21: mol_type = other RNA
aacgtcatagtcataaaattc

SEQ ID NO: 1727 - RNA, 21 nt, synthetic construct
  source 1..21: mol_type = other RNA
tcttccgcttctgttgttccc

SEQ ID NO: 1728 - RNA, 21 nt, synthetic construct
  source 1..21: mol_type = other RNA
cgttcgccgctgggagccacg

SEQ ID NO: 1729 - RNA, 21 nt, synthetic construct
  source 1..21: mol_type = other RNA
gtctgatccatctagcaccag

SEQ ID NO: 1730 - RNA, 21 nt, synthetic construct
  source 1..21: mol_type = other RNA
gggcatccccattggcacaag

SEQ ID NO: 1731 - RNA, 21 nt, synthetic construct
  source 1..21: mol_type = other RNA
aggtgattctggcggcccctt

SEQ ID NO: 1732 - RNA, 20 nt, synthetic construct
  source 1..20: mol_type = other RNA
ctagatggatcagacagcat

SEQ ID NO: 1733 - RNA, 20 nt, synthetic construct
  source 1..20: mol_type = other RNA
tagatggatcagacagcatt

SEQ ID NO: 1734 - RNA, 20 nt, synthetic construct
  source 1..20: mol_type = other RNA
tggctttcatctggcagaga

SEQ ID NO: 1735 - RNA, 20 nt, synthetic construct
  source 1..20: mol_type = other RNA
ctgttgttcccctgggtgcc

SEQ ID NO: 1736 - RNA, 20 nt, synthetic construct
  source 1..20: mol_type = other RNA
aaagcttcggccacctcttg

SEQ ID NO: 1737 - RNA, 20 nt, synthetic construct
  source 1..20: mol_type = other RNA
aagcttcggccacctcttga

SEQ ID NO: 1738 - RNA, 20 nt, synthetic construct
  source 1..20: mol_type = other RNA
agcttcggccacctcttgag

SEQ ID NO: 1739 - RNA, 20 nt, synthetic construct
  source 1..20: mol_type = other RNA
cgaagctttcctgtcttccc

SEQ ID NO: 1740 - RNA, 20 nt, synthetic construct
  source 1..20: mol_type = other RNA
ggctttcatctggcagagaa

SEQ ID NO: 1741 - RNA, 20 nt, synthetic construct
  source 1..20: mol_type = other RNA
tgttgttcccctgggtgcca

SEQ ID NO: 1742 - RNA, 21 nt, synthetic construct
  source 1..21: mol_type = other RNA
gaaagcttcggccacctcttg

SEQ ID NO: 1743 - DNA, 20 bp, synthetic construct
  source 1..20: mol_type = other DNA
ctgcaggattgcacaacatg

SEQ ID NO: 1744 - DNA, 20 bp, synthetic construct
  source 1..20: mol_type = other DNA
ataggcccatttgtctcccc

SEQ ID NO: 1745 - DNA, 20 bp, synthetic construct
  source 1..20: mol_type = other DNA
ctctgcaggttggtgtaatc

SEQ ID NO: 1746 - DNA, 20 bp, synthetic construct
  source 1..20: mol_type = other DNA
acgctctcacctgatagtct

SEQ ID NO: 1747 - DNA, 20 bp, synthetic construct
  source 1..20: mol_type = other DNA
cttacaatgactgagatctt

SEQ ID NO: 1748 - DNA, 20 bp, synthetic construct
  source 1..20: mol_type = other DNA
tcacctccgttgtcacagat

SEQ ID NO: 1749 - DNA, 20 bp, synthetic construct
  source 1..20: mol_type = other DNA
tcgcttacctccagacaaga

SEQ ID NO: 1750 - DNA, 20 bp, synthetic construct
  source 1..20: mol_type = other DNA
cacccacaggtggcaagtta

SEQ ID NO: 1751 - DNA, 20 bp, synthetic construct
  source 1..20: mol_type = other DNA
acagaccacaagttgaagtc

SEQ ID NO: 1752 - DNA, 20 bp, synthetic construct
  source 1..20: mol_type = other DNA
tctgcaggattgcacaacat

SEQ ID NO: 1753 - DNA, 20 bp, synthetic construct
  source 1..20: mol_type = other DNA
gcaggattgcacaacatggg

SEQ ID NO: 1754 - DNA, 20 bp, synthetic construct
  source 1..20: mol_type = other DNA
ccctcagatgtctatgtgtt

SEQ ID NO: 1755 - DNA, 20 bp, synthetic construct
  source 1..20: mol_type = other DNA
cctcagatgtctatgtgttt

SEQ ID NO: 1756 - DNA, 20 bp, synthetic construct
  source 1..20: mol_type = other DNA
ctcagatgtctatgtgtttg

SEQ ID NO: 1757 - DNA, 20 bp, synthetic construct
  source 1..20: mol_type = other DNA
gtgtccccagcgcccttcaa

SEQ ID NO: 1758 - DNA, 20 bp, synthetic construct
  source 1..20: mol_type = other DNA
tgtccccagcgcccttcaaa

SEQ ID NO: 1759 - DNA, 20 bp, synthetic construct
  source 1..20: mol_type = other DNA
ctacttcaggaggggagaag

SEQ ID NO: 1760 - DNA, 20 bp, synthetic construct
  source 1..20: mol_type = other DNA
tacttcaggaggggagaagc

SEQ ID NO: 1761 - DNA, 20 bp, synthetic construct
  source 1..20: mol_type = other DNA
ctccttgcaggtgattctgg

SEQ ID NO: 1762 - DNA, 20 bp, synthetic construct
  source 1..20: mol_type = other DNA
tgcaggttggtgtaatcagc

SEQ ID NO: 1763 - DNA, 20 bp, synthetic construct
  source 1..20: mol_type = other DNA
gcaggttggtgtaatcagct

SEQ ID NO: 1764 - DNA, 20 bp, synthetic construct
  source 1..20: mol_type = other DNA
tctcacctctgcaagtattg

SEQ ID NO: 1765 - DNA, 20 bp, synthetic construct
  source 1..20: mol_type = other DNA
cttactttgttgctggcaag

SEQ ID NO: 1766 - DNA, 20 bp, synthetic construct
  source 1..20: mol_type = other DNA
gcttacaatgactgagatct

SEQ ID NO: 1767 - DNA, 20 bp, synthetic construct
  source 1..20: mol_type = other DNA
tcacccagataatcctccct

SEQ ID NO: 1768 - DNA, 20 bp, synthetic construct
  source 1..20: mol_type = other DNA
ccttctgaccatcagtcatg

SEQ ID NO: 1769 - DNA, 20 bp, synthetic construct
  source 1..20: mol_type = other DNA
caaaggtcaccttggcagga

SEQ ID NO: 1770 - DNA, 20 bp, synthetic construct
  source 1..20: mol_type = other DNA
ctcgcttacctccagacaag

SEQ ID NO: 1771 - DNA, 20 bp, synthetic construct
  source 1..20: mol_type = other DNA
tcaaagcaatccactgtcca

SEQ ID NO: 1772 - DNA, 20 bp, synthetic construct
  source 1..20: mol_type = other DNA
ctcccagactccttcatgta

SEQ ID NO: 1773 - DNA, 20 bp, synthetic construct
  source 1..20: mol_type = other DNA
cccaggggaacaacagaagc

SEQ ID NO: 1774 - DNA, 20 bp, synthetic construct
  source 1..20: mol_type = other DNA
acaggtggcaagttatggtg

SEQ ID NO: 1775 - DNA, 20 bp, synthetic construct
  source 1..20: mol_type = other DNA
gccagatgaaagccagtctc

SEQ ID NO: 1776 - DNA, 20 bp, synthetic construct
  source 1..20: mol_type = other DNA
gtccccagcgcccttcaaag

SEQ ID NO: 1777 - DNA, 20 bp, synthetic construct
  source 1..20: mol_type = other DNA
tacagaaaggcagctgtgag

SEQ ID NO: 1778 - DNA, 20 bp, synthetic construct
  source 1..20: mol_type = other DNA
gaggactcacttgaatgaaa

SEQ ID NO: 1779 - DNA, 20 bp, synthetic construct
  source 1..20: mol_type = other DNA
tctcaccttatccccattct

SEQ ID NO: 1780 - DNA, 20 bp, synthetic construct
  source 1..20: mol_type = other DNA
atccttacctacgctgacct

SEQ ID NO: 1781 - DNA, 20 bp, synthetic construct
  source 1..20: mol_type = other DNA
ttacctacgctgaccttgat

SEQ ID NO: 1782 - DNA, 20 bp, synthetic construct
  source 1..20: mol_type = other DNA
ctccctaccgatcatttggt

SEQ ID NO: 1783 - DNA, 20 bp, synthetic construct
  source 1..20: mol_type = other DNA
ctgaccatcagtcatgagga

SEQ ID NO: 1784 - DNA, 20 bp, synthetic construct
  source 1..20: mol_type = other DNA
cttctcacctccgttgtcac

SEQ ID NO: 1785 - DNA, 21 bp, synthetic construct
  source 1..21: mol_type = other DNA
tccctcagatgtctatgtgtt

SEQ ID NO: 1786 - DNA, 21 bp, synthetic construct
  source 1..21: mol_type = other DNA
ctgccagatgaaagccagtct

SEQ ID NO: 1787 - DNA, 21 bp, synthetic construct
  source 1..21: mol_type = other DNA
ttctctcacctctgcaagtat

SEQ ID NO: 1788 - DNA, 21 bp, synthetic construct
  source 1..21: mol_type = other DNA
ccttacctacgctgaccttga

SEQ ID NO: 1789 - DNA, 21 bp, synthetic construct
  source 1..21: mol_type = other DNA
actcacccagataatcctccc

SEQ ID NO: 1790 - DNA, 21 bp, synthetic construct
  source 1..21: mol_type = other DNA
tcccttctgaccatcagtcat

SEQ ID NO: 1791 - DNA, 21 bp, synthetic construct
  source 1..21: mol_type = other DNA
cttcaggtgtgaccaccactc

SEQ ID NO: 1792 - DNA, 21 bp, synthetic construct
  source 1..21: mol_type = other DNA
ccctctccacagaccacaagt

SEQ ID NO: 1793 - DNA, 21 bp, synthetic construct
  source 1..21: mol_type = other DNA
ctacagaaaggcagctgtgag

SEQ ID NO: 1794 - DNA, 21 bp, synthetic construct
  source 1..21: mol_type = other DNA
gtatgtcttactttgttgctg

SEQ ID NO: 1795 - DNA, 21 bp, synthetic construct
  source 1..21: mol_type = other DNA
tgtcttactttgttgctggca

SEQ ID NO: 1796 - DNA, 21 bp, synthetic construct
  source 1..21: mol_type = other DNA
tgcatccttacctacgctgac

SEQ ID NO: 1797 - DNA, 21 bp, synthetic construct
  source 1..21: mol_type = other DNA
ggattctgtgcttacaatgac

SEQ ID NO: 1798 - DNA, 21 bp, synthetic construct
  source 1..21: mol_type = other DNA
cttgtatctccctaccgatca

SEQ ID NO: 1799 - DNA, 21 bp, synthetic construct
  source 1..21: mol_type = other DNA
cttctgaccatcagtcatgag

SEQ ID NO: 1800 - DNA, 21 bp, synthetic construct
  source 1..21: mol_type = other DNA
ccctaacctctgaccttcata

SEQ ID NO: 1801 - DNA, 21 bp, synthetic construct
  source 1..21: mol_type = other DNA
aggaggattccaccttctcaa

SEQ ID NO: 1802 - DNA, 21 bp, synthetic construct
  source 1..21: mol_type = other DNA
atgcttctcacctccgttgtc

SEQ ID NO: 1803 - DNA, 21 bp, synthetic construct
  source 1..21: mol_type = other DNA
ttctccaagagggccaggcac

SEQ ID NO: 1804 - DNA, 21 bp, synthetic construct
  source 1..21: mol_type = other DNA
accaaaagactgtcaggaagg

SEQ ID NO: 1805 - DNA, 21 bp, synthetic construct
  source 1..21: mol_type = other DNA
acctgccaagtgaatggccga

SEQ ID NO: 1806 - DNA, 21 bp, synthetic construct
  source 1..21: mol_type = other DNA
gagcaacatgtgttcaaagtc

SEQ ID NO: 1807 - DNA, 21 bp, synthetic construct
  source 1..21: mol_type = other DNA
tacaccaacctgcagaggcag

SEQ ID NO: 1808 - DNA, 21 bp, synthetic construct
  source 1..21: mol_type = other DNA
ggctttcatctggcagagaag

SEQ ID NO: 1809 - DNA, 21 bp, synthetic construct
  source 1..21: mol_type = other DNA
gacatctgagggataaaaagg

SEQ ID NO: 1810 - DNA, 21 bp, synthetic construct
  source 1..21: mol_type = other DNA
tgttgttcccctgggtgccag

SEQ ID NO: 1811 - DNA, 21 bp, synthetic construct
  source 1..21: mol_type = other DNA
atcgcacctgccaagtgaatg

SEQ ID NO: 1812 - DNA, 21 bp, synthetic construct
  source 1..21: mol_type = other DNA
tggccgatggagtgggcagac

SEQ ID NO: 1813 - DNA, 21 bp, synthetic construct
  source 1..21: mol_type = other DNA
tcccagcggcgaacgtgtcag

SEQ ID NO: 1814 - DNA, 21 bp, synthetic construct
  source 1..21: mol_type = other DNA
cccaggggaacaacagaagcg

SEQ ID NO: 1815 - DNA, 21 bp, synthetic construct
  source 1..21: mol_type = other DNA
gtcacgaagcagctcaatgaa

SEQ ID NO: 1816 - DNA, 21 bp, synthetic construct
  source 1..21: mol_type = other DNA
ggccctccaggcagtgtacag

SEQ ID NO: 1817 - DNA, 21 bp, synthetic construct
  source 1..21: mol_type = other DNA
tttctaccaaatgatcggtag

SEQ ID NO: 1818 - DNA, 21 bp, synthetic construct
  source 1..21: mol_type = other DNA
gcaaccatggcaggccaagat

SEQ ID NO: 1819 - DNA, 21 bp, synthetic construct
  source 1..21: mol_type = other DNA
tcagccagggcagcacttgaa

SEQ ID NO: 1820 - DNA, 21 bp, synthetic construct
  source 1..21: mol_type = other DNA
cttactttgttgctggcaagt

SEQ ID NO: 1821 - DNA, 21 bp, synthetic construct
  source 1..21: mol_type = other DNA
ctcccctcctgaagtaggaga

SEQ ID NO: 1822 - DNA, 21 bp, synthetic construct
  source 1..21: mol_type = other DNA
tttgaagggcgctggggacac

SEQ ID NO: 1823 - DNA, 21 bp, synthetic construct
  source 1..21: mol_type = other DNA
tcttggcctgccatggttgct

SEQ ID NO: 1824 - DNA, 21 bp, synthetic construct
  source 1..21: mol_type = other DNA
tggcctgccatggttgcttgt

SEQ ID NO: 1825 - DNA, 21 bp, synthetic construct
  source 1..21: mol_type = other DNA
atgaaggagtctgggagagtc

SEQ ID NO: 1826 - DNA, 21 bp, synthetic construct
  source 1..21: mol_type = other DNA
ggagtctgggagagtcagaaa

SEQ ID NO: 1827 - DNA, 21 bp, synthetic construct
  source 1..21: mol_type = other DNA
cgctgcagaggtatgagacat

SEQ ID NO: 1828 - DNA, 21 bp, synthetic construct
  source 1..21: mol_type = other DNA
actccatcggccattcacttg

SEQ ID NO: 1829 - DNA, 21 bp, synthetic construct
  source 1..21: mol_type = other DNA
ggggccagtattccccgttct

SEQ ID NO: 1830 - DNA, 21 bp, synthetic construct
  source 1..21: mol_type = other DNA
ggattgctttgagaagggggg

SEQ ID NO: 1831 - DNA, 21 bp, synthetic construct
  source 1..21: mol_type = other DNA
ttcagggtgctccaggacccc

SEQ ID NO: 1832 - DNA, 21 bp, synthetic construct
  source 1..21: mol_type = other DNA
gctccaggaccccgtagatct

SEQ ID NO: 1833 - DNA, 21 bp, synthetic construct
  source 1..21: mol_type = other DNA
tggtcacacctgaagagaaag

SEQ ID NO: 1834 - DNA, 21 bp, synthetic construct
  source 1..21: mol_type = other DNA
cttacctccagacaagaggcc

SEQ ID NO: 1835 - DNA, 20 bp, synthetic construct
  source 1..20: mol_type = other DNA
ctccttccgacttctccaag

SEQ ID NO: 1836 - DNA, 20 bp, synthetic construct
  source 1..20: mol_type = other DNA
tccttccgacttctccaaga

SEQ ID NO: 1837 - DNA, 20 bp, synthetic construct
  source 1..20: mol_type = other DNA
tctccaagagggccaggcac

SEQ ID NO: 1838 - DNA, 20 bp, synthetic construct
  source 1..20: mol_type = other DNA
ctcaagaccaaaagactgtc

SEQ ID NO: 1839 - DNA, 20 bp, synthetic construct
  source 1..20: mol_type = other DNA
agaccaaaagactgtcagga

SEQ ID NO: 1840 - DNA, 20 bp, synthetic construct
  source 1..20: mol_type = other DNA
cctgccaagtgaatggccga

SEQ ID NO: 1841 - DNA, 20 bp, synthetic construct
  source 1..20: mol_type = other DNA
ctcccagcggcgaacgtgtc

SEQ ID NO: 1842 - DNA, 20 bp, synthetic construct
  source 1..20: mol_type = other DNA
cagcggcgaacgtgtcagga

SEQ ID NO: 1843 - DNA, 20 bp, synthetic construct
  source 1..20: mol_type = other DNA
cggcgaacgtgtcaggaagg

SEQ ID NO: 1844 - DNA, 20 bp, synthetic construct
  source 1..20: mol_type = other DNA
cgtgtcaggaaggtggctct

SEQ ID NO: 1845 - DNA, 20 bp, synthetic construct
  source 1..20: mol_type = other DNA
ttttctaccaaatgatcggt

SEQ ID NO: 1846 - DNA, 20 bp, synthetic construct
  source 1..20: mol_type = other DNA
tttctaccaaatgatcggta

SEQ ID NO: 1847 - DNA, 20 bp, synthetic construct
  source 1..20: mol_type = other DNA
gcaacaaagtaagacatact

SEQ ID NO: 1848 - DNA, 20 bp, synthetic construct
  source 1..20: mol_type = other DNA
acctctttcaagtgctgccc

SEQ ID NO: 1849 - DNA, 20 bp, synthetic construct
  source 1..20: mol_type = other DNA
gaaactccaagatgaggatt

SEQ ID NO: 1850 - DNA, 20 bp, synthetic construct
  source 1..20: mol_type = other DNA
aaactccaagatgaggattt

SEQ ID NO: 1851 - DNA, 20 bp, synthetic construct
  source 1..20: mol_type = other DNA
caccaacctgcagaggcagt

SEQ ID NO: 1852 - DNA, 20 bp, synthetic construct
  source 1..20: mol_type = other DNA
accaacctgcagaggcagtg

SEQ ID NO: 1853 - DNA, 20 bp, synthetic construct
  source 1..20: mol_type = other DNA
tgcctttctgtaggggaggt

SEQ ID NO: 1854 - DNA, 20 bp, synthetic construct
  source 1..20: mol_type = other DNA
aaatgggcctataaaggaca

SEQ ID NO: 1855 - DNA, 20 bp, synthetic construct
  source 1..20: mol_type = other DNA
ccctcctgaagtaggagagt

SEQ ID NO: 1856 - DNA, 20 bp, synthetic construct
  source 1..20: mol_type = other DNA
tggcctgccatggttgcttg

SEQ ID NO: 1857 - DNA, 20 bp, synthetic construct
  source 1..20: mol_type = other DNA
tagacatctgagggataaaa

SEQ ID NO: 1858 - DNA, 20 bp, synthetic construct
  source 1..20: mol_type = other DNA
catctgagggataaaaagga

SEQ ID NO: 1859 - DNA, 20 bp, synthetic construct
  source 1..20: mol_type = other DNA
tgcaatcctgcagaagagac

SEQ ID NO: 1860 - DNA, 20 bp, synthetic construct
  source 1..20: mol_type = other DNA
gtgcggttccagccttcagg

SEQ ID NO: 1861 - DNA, 20 bp, synthetic construct
  source 1..20: mol_type = other DNA
tgcggttccagccttcagga

SEQ ID NO: 1862 - DNA, 20 bp, synthetic construct
  source 1..20: mol_type = other DNA
gacccaaattttggggtatg

SEQ ID NO: 1863 - DNA, 20 bp, synthetic construct
  source 1..20: mol_type = other DNA
cactccatcggccattcact

SEQ ID NO: 1864 - DNA, 20 bp, synthetic construct
  source 1..20: mol_type = other DNA
gtggattgctttgagaaggg

SEQ ID NO: 1865 - DNA, 20 bp, synthetic construct
  source 1..20: mol_type = other DNA
ccccagggatcctgctctct

SEQ ID NO: 1866 - DNA, 20 bp, synthetic construct
  source 1..20: mol_type = other DNA
tcaagaccaaaagactgtca

SEQ ID NO: 1867 - DNA, 20 bp, synthetic construct
  source 1..20: mol_type = other DNA
gcacctgccaagtgaatggc

SEQ ID NO: 1868 - DNA, 20 bp, synthetic construct
  source 1..20: mol_type = other DNA
ctgccaagtgaatggccgat

SEQ ID NO: 1869 - DNA, 20 bp, synthetic construct
  source 1..20: mol_type = other DNA
gaatggccgatggagtgggc

SEQ ID NO: 1870 - DNA, 20 bp, synthetic construct
  source 1..20: mol_type = other DNA
agtgggcagacagcgatctg

SEQ ID NO: 1871 - DNA, 20 bp, synthetic construct
  source 1..20: mol_type = other DNA
ggcagccagtaccgccttga

SEQ ID NO: 1872 - DNA, 20 bp, synthetic construct
  source 1..20: mol_type = other DNA
tcccagcggcgaacgtgtca

SEQ ID NO: 1873 - DNA, 20 bp, synthetic construct
  source 1..20: mol_type = other DNA
gtgtcaggaaggtggctctt

SEQ ID NO: 1874 - DNA, 20 bp, synthetic construct
  source 1..20: mol_type = other DNA
aggggaacaacagaagcgga

SEQ ID NO: 1875 - DNA, 20 bp, synthetic construct
  source 1..20: mol_type = other DNA
cctccaggcagtgtacagca

SEQ ID NO: 1876 - DNA, 20 bp, synthetic construct
  source 1..20: mol_type = other DNA
ttctaccaaatgatcggtag

SEQ ID NO: 1877 - DNA, 20 bp, synthetic construct
  source 1..20: mol_type = other DNA
ctaccaaatgatcggtaggg

SEQ ID NO: 1878 - DNA, 20 bp, synthetic construct
  source 1..20: mol_type = other DNA
caagcaaccatggcaggcca

SEQ ID NO: 1879 - DNA, 20 bp, synthetic construct
  source 1..20: mol_type = other DNA
tatggccagactatcaggtg

SEQ ID NO: 1880 - DNA, 20 bp, synthetic construct
  source 1..20: mol_type = other DNA
cacttgccagcaacaaagta

SEQ ID NO: 1881 - DNA, 20 bp, synthetic construct
  source 1..20: mol_type = other DNA
gctcaatatgccccaggcta

SEQ ID NO: 1882 - DNA, 20 bp, synthetic construct
  source 1..20: mol_type = other DNA
ctttcaagtgctgccctggc

SEQ ID NO: 1883 - DNA, 20 bp, synthetic construct
  source 1..20: mol_type = other DNA
ccttcagccagggcagcact

SEQ ID NO: 1884 - DNA, 20 bp, synthetic construct
  source 1..20: mol_type = other DNA
cagccagggcagcacttgaa

SEQ ID NO: 1885 - DNA, 20 bp, synthetic construct
  source 1..20: mol_type = other DNA
gcctttctgtaggggaggtg

SEQ ID NO: 1886 - DNA, 20 bp, synthetic construct
  source 1..20: mol_type = other DNA
aatgggcctataaaggacaa

SEQ ID NO: 1887 - DNA, 20 bp, synthetic construct
  source 1..20: mol_type = other DNA
tgggcctataaaggacaagg

SEQ ID NO: 1888 - DNA, 20 bp, synthetic construct
  source 1..20: mol_type = other DNA
gtgttcccaaaccatgccac

SEQ ID NO: 1889 - DNA, 20 bp, synthetic construct
  source 1..20: mol_type = other DNA
gttcccaaaccatgccacag

SEQ ID NO: 1890 - DNA, 20 bp, synthetic construct
  source 1..20: mol_type = other DNA
gcggttccagccttcaggag

SEQ ID NO: 1891 - DNA, 20 bp, synthetic construct
  source 1..20: mol_type = other DNA
ttgtggtctgtggagaggga

SEQ ID NO: 1892 - DNA, 20 bp, synthetic construct
  source 1..20: mol_type = other DNA
gagtctgggagagtcagaaa

SEQ ID NO: 1893 - DNA, 20 bp, synthetic construct
  source 1..20: mol_type = other DNA
cgctccaagagccaccttcc

SEQ ID NO: 1894 - DNA, 20 bp, synthetic construct
  source 1..20: mol_type = other DNA
taccccgctgcagaggtatg

SEQ ID NO: 1895 - DNA, 20 bp, synthetic construct
  source 1..20: mol_type = other DNA
gggccagtattccccgttct

SEQ ID NO: 1896 - DNA, 20 bp, synthetic construct
  source 1..20: mol_type = other DNA
tggattgctttgagaagggg

SEQ ID NO: 1897 - DNA, 20 bp, synthetic construct
  source 1..20: mol_type = other DNA
agggtgctccaggaccccgt

SEQ ID NO: 1898 - DNA, 20 bp, synthetic construct
  source 1..20: mol_type = other DNA
cacctgaagagaaaggctga

SEQ ID NO: 1899 - RNA, 20 nt, synthetic construct
  source 1..20: mol_type = other RNA
ctgcaggattgcacaacatg

SEQ ID NO: 1900 - RNA, 20 nt, synthetic construct
  source 1..20: mol_type = other RNA
ataggcccatttgtctcccc

SEQ ID NO: 1901 - RNA, 20 nt, synthetic construct
  source 1..20: mol_type = other RNA
ctctgcaggttggtgtaatc

SEQ ID NO: 1902 - RNA, 20 nt, synthetic construct
  source 1..20: mol_type = other RNA
acgctctcacctgatagtct

SEQ ID NO: 1903 - RNA, 20 nt, synthetic construct
  source 1..20: mol_type = other RNA
cttacaatgactgagatctt

SEQ ID NO: 1904 - RNA, 20 nt, synthetic construct
  source 1..20: mol_type = other RNA
tcacctccgttgtcacagat

SEQ ID NO: 1905 - RNA, 20 nt, synthetic construct
  source 1..20: mol_type = other RNA
tcgcttacctccagacaaga

SEQ ID NO: 1906 - RNA, 20 nt, synthetic construct
  source 1..20: mol_type = other RNA
cacccacaggtggcaagtta

SEQ ID NO: 1907 - RNA, 20 nt, synthetic construct
  source 1..20: mol_type = other RNA
acagaccacaagttgaagtc

SEQ ID NO: 1908 - RNA, 20 nt, synthetic construct
  source 1..20: mol_type = other RNA
tctgcaggattgcacaacat

SEQ ID NO: 1909 - RNA, 20 nt, synthetic construct
  source 1..20: mol_type = other RNA
gcaggattgcacaacatggg

SEQ ID NO: 1910 - RNA, 20 nt, synthetic construct
  source 1..20: mol_type = other RNA
ccctcagatgtctatgtgtt

SEQ ID NO: 1911 - RNA, 20 nt, synthetic construct
  source 1..20: mol_type = other RNA
cctcagatgtctatgtgttt

SEQ ID NO: 1912 - RNA, 20 nt, synthetic construct
  source 1..20: mol_type = other RNA
ctcagatgtctatgtgtttg

SEQ ID NO: 1913 - RNA, 20 nt, synthetic construct
  source 1..20: mol_type = other RNA
gtgtccccagcgcccttcaa

SEQ ID NO: 1914 - RNA, 20 nt, synthetic construct
  source 1..20: mol_type = other RNA
tgtccccagcgcccttcaaa

SEQ ID NO: 1915 - RNA, 20 nt, synthetic construct
  source 1..20: mol_type = other RNA
ctacttcaggaggggagaag

SEQ ID NO: 1916 - RNA, 20 nt, synthetic construct
  source 1..20: mol_type = other RNA
tacttcaggaggggagaagc

SEQ ID NO: 1917 - RNA, 20 nt, synthetic construct
  source 1..20: mol_type = other RNA
ctccttgcaggtgattctgg

SEQ ID NO: 1918 - RNA, 20 nt, synthetic construct
  source 1..20: mol_type = other RNA
tgcaggttggtgtaatcagc

SEQ ID NO: 1919 - RNA, 20 nt, synthetic construct
  source 1..20: mol_type = other RNA
gcaggttggtgtaatcagct

SEQ ID NO: 1920 - RNA, 20 nt, synthetic construct
  source 1..20: mol_type = other RNA
tctcacctctgcaagtattg

SEQ ID NO: 1921 - RNA, 20 nt, synthetic construct
  source 1..20: mol_type = other RNA
cttactttgttgctggcaag

SEQ ID NO: 1922 - RNA, 20 nt, synthetic construct
  source 1..20: mol_type = other RNA
gcttacaatgactgagatct

SEQ ID NO: 1923 - RNA, 20 nt, synthetic construct
  source 1..20: mol_type = other RNA
tcacccagataatcctccct

SEQ ID NO: 1924 - RNA, 20 nt, synthetic construct
  source 1..20: mol_type = other RNA
ccttctgaccatcagtcatg

SEQ ID NO: 1925 - RNA, 20 nt, synthetic construct
  source 1..20: mol_type = other RNA
caaaggtcaccttggcagga

SEQ ID NO: 1926 - RNA, 20 nt, synthetic construct
  source 1..20: mol_type = other RNA
ctcgcttacctccagacaag

SEQ ID NO: 1927 - RNA, 20 nt, synthetic construct
  source 1..20: mol_type = other RNA
tcaaagcaatccactgtcca

SEQ ID NO: 1928 - RNA, 20 nt, synthetic construct
  source 1..20: mol_type = other RNA
ctcccagactccttcatgta

SEQ ID NO: 1929 - RNA, 20 nt, synthetic construct
  source 1..20: mol_type = other RNA
cccaggggaacaacagaagc

SEQ ID NO: 1930 - RNA, 20 nt, synthetic construct
  source 1..20: mol_type = other RNA
acaggtggcaagttatggtg

SEQ ID NO: 1931 - RNA, 20 nt, synthetic construct
  source 1..20: mol_type = other RNA
gccagatgaaagccagtctc

SEQ ID NO: 1932 - RNA, 20 nt, synthetic construct
  source 1..20: mol_type = other RNA
gtccccagcgcccttcaaag

SEQ ID NO: 1933 - RNA, 20 nt, synthetic construct
  source 1..20: mol_type = other RNA
tacagaaaggcagctgtgag

SEQ ID NO: 1934 - RNA, 20 nt, synthetic construct
  source 1..20: mol_type = other RNA
gaggactcacttgaatgaaa

SEQ ID NO: 1935 - RNA, 20 nt, synthetic construct
  source 1..20: mol_type = other RNA
tctcaccttatccccattct

SEQ ID NO: 1936 - RNA, 20 nt, synthetic construct
  source 1..20: mol_type = other RNA
atccttacctacgctgacct

SEQ ID NO: 1937 - RNA, 20 nt, synthetic construct
  source 1..20: mol_type = other RNA
ttacctacgctgaccttgat

SEQ ID NO: 1938 - RNA, 20 nt, synthetic construct
  source 1..20: mol_type = other RNA
ctccctaccgatcatttggt

SEQ ID NO: 1939 - RNA, 20 nt, synthetic construct
  source 1..20: mol_type = other RNA
ctgaccatcagtcatgagga

SEQ ID NO: 1940 - RNA, 20 nt, synthetic construct
  source 1..20: mol_type = other RNA
cttctcacctccgttgtcac

SEQ ID NO: 1941 - RNA, 21 nt, synthetic construct
  source 1..21: mol_type = other RNA
tccctcagatgtctatgtgtt

SEQ ID NO: 1942 - RNA, 21 nt, synthetic construct
  source 1..21: mol_type = other RNA
ctgccagatgaaagccagtct

SEQ ID NO: 1943 - RNA, 21 nt, synthetic construct
  source 1..21: mol_type = other RNA
ttctctcacctctgcaagtat

SEQ ID NO: 1944 - RNA, 21 nt, synthetic construct
  source 1..21: mol_type = other RNA
ccttacctacgctgaccttga

SEQ ID NO: 1945 - RNA, 21 nt, synthetic construct
  source 1..21: mol_type = other RNA
actcacccagataatcctccc

SEQ ID NO: 1946 - RNA, 21 nt, synthetic construct
  source 1..21: mol_type = other RNA
tcccttctgaccatcagtcat

SEQ ID NO: 1947 - RNA, 21 nt, synthetic construct
  source 1..21: mol_type = other RNA
cttcaggtgtgaccaccactc

SEQ ID NO: 1948 - RNA, 21 nt, synthetic construct
  source 1..21: mol_type = other RNA
ccctctccacagaccacaagt

SEQ ID NO: 1949 - RNA, 21 nt, synthetic construct
  source 1..21: mol_type = other RNA
ctacagaaaggcagctgtgag

SEQ ID NO: 1950 - RNA, 21 nt, synthetic construct
  source 1..21: mol_type = other RNA
gtatgtcttactttgttgctg

SEQ ID NO: 1951 - RNA, 21 nt, synthetic construct
  source 1..21: mol_type = other RNA
tgtcttactttgttgctggca

SEQ ID NO: 1952 - RNA, 21 nt, synthetic construct
  source 1..21: mol_type = other RNA
tgcatccttacctacgctgac

SEQ ID NO: 1953 - RNA, 21 nt, synthetic construct
  source 1..21: mol_type = other RNA
ggattctgtgcttacaatgac

SEQ ID NO: 1954 - RNA, 21 nt, synthetic construct
  source 1..21: mol_type = other RNA
cttgtatctccctaccgatca

SEQ ID NO: 1955 - RNA, 21 nt, synthetic construct
  source 1..21: mol_type = other RNA
cttctgaccatcagtcatgag

SEQ ID NO: 1956 - RNA, 21 nt, synthetic construct
  source 1..21: mol_type = other RNA
ccctaacctctgaccttcata

SEQ ID NO: 1957 - RNA, 21 nt, synthetic construct
  source 1..21: mol_type = other RNA
aggaggattccaccttctcaa

SEQ ID NO: 1958 - RNA, 21 nt, synthetic construct
  source 1..21: mol_type = other RNA
atgcttctcacctccgttgtc

SEQ ID NO: 1959 - RNA, 21 nt, synthetic construct
  source 1..21: mol_type = other RNA
ttctccaagagggccaggcac

SEQ ID NO: 1960 - RNA, 21 nt, synthetic construct
  source 1..21: mol_type = other RNA
accaaaagactgtcaggaagg

SEQ ID NO: 1961 - RNA, 21 nt, synthetic construct
  source 1..21: mol_type = other RNA
acctgccaagtgaatggccga

SEQ ID NO: 1962 - RNA, 21 nt, synthetic construct
  source 1..21: mol_type = other RNA
gagcaacatgtgttcaaagtc

SEQ ID NO: 1963 - RNA, 21 nt, synthetic construct
  source 1..21: mol_type = other RNA
tacaccaacctgcagaggcag

SEQ ID NO: 1964 - RNA, 21 nt, synthetic construct
  source 1..21: mol_type = other RNA
ggctttcatctggcagagaag

SEQ ID NO: 1965 - RNA, 21 nt, synthetic construct
  source 1..21: mol_type = other RNA
gacatctgagggataaaaagg

SEQ ID NO: 1966 - RNA, 21 nt, synthetic construct
  source 1..21: mol_type = other RNA
tgttgttcccctgggtgccag

SEQ ID NO: 1967 - RNA, 21 nt, synthetic construct
  source 1..21: mol_type = other RNA
atcgcacctgccaagtgaatg

SEQ ID NO: 1968 - RNA, 21 nt, synthetic construct
  source 1..21: mol_type = other RNA
tggccgatggagtgggcagac

SEQ ID NO: 1969 - RNA, 21 nt, synthetic construct
  source 1..21: mol_type = other RNA
tcccagcggcgaacgtgtcag

SEQ ID NO: 1970 - RNA, 21 nt, synthetic construct
  source 1..21: mol_type = other RNA
cccaggggaacaacagaagcg

SEQ ID NO: 1971 - RNA, 21 nt, synthetic construct
  source 1..21: mol_type = other RNA
gtcacgaagcagctcaatgaa

SEQ ID NO: 1972 - RNA, 21 nt, synthetic construct
  source 1..21: mol_type = other RNA
ggccctccaggcagtgtacag

SEQ ID NO: 1973 - RNA, 21 nt, synthetic construct
  source 1..21: mol_type = other RNA
tttctaccaaatgatcggtag

SEQ ID NO: 1974 - RNA, 21 nt, synthetic construct
  source 1..21: mol_type = other RNA
gcaaccatggcaggccaagat

SEQ ID NO: 1975 - RNA, 21 nt, synthetic construct
  source 1..21: mol_type = other RNA
tcagccagggcagcacttgaa

SEQ ID NO: 1976 - RNA, 21 nt, synthetic construct
  source 1..21: mol_type = other RNA
cttactttgttgctggcaagt

SEQ ID NO: 1977 - RNA, 21 nt, synthetic construct
  source 1..21: mol_type = other RNA
ctcccctcctgaagtaggaga

SEQ ID NO: 1978 - RNA, 21 nt, synthetic construct
  source 1..21: mol_type = other RNA
tttgaagggcgctggggacac

SEQ ID NO: 1979 - RNA, 21 nt, synthetic construct
  source 1..21: mol_type = other RNA
tcttggcctgccatggttgct

SEQ ID NO: 1980 - RNA, 21 nt, synthetic construct
  source 1..21: mol_type = other RNA
tggcctgccatggttgcttgt

SEQ ID NO: 1981 - RNA, 21 nt, synthetic construct
  source 1..21: mol_type = other RNA
atgaaggagtctgggagagtc

SEQ ID NO: 1982 - RNA, 21 nt, synthetic construct
  source 1..21: mol_type = other RNA
ggagtctgggagagtcagaaa

SEQ ID NO: 1983 - RNA, 21 nt, synthetic construct
  source 1..21: mol_type = other RNA
cgctgcagaggtatgagacat

SEQ ID NO: 1984 - RNA, 21 nt, synthetic construct
  source 1..21: mol_type = other RNA
actccatcggccattcacttg

SEQ ID NO: 1985 - RNA, 21 nt, synthetic construct
  source 1..21: mol_type = other RNA
ggggccagtattccccgttct

SEQ ID NO: 1986 - RNA, 21 nt, synthetic construct
  source 1..21: mol_type = other RNA
ggattgctttgagaagggggg

SEQ ID NO: 1987 - RNA, 21 nt, synthetic construct
  source 1..21: mol_type = other RNA
ttcagggtgctccaggacccc

SEQ ID NO: 1988 - RNA, 21 nt, synthetic construct
  source 1..21: mol_type = other RNA
gctccaggaccccgtagatct

SEQ ID NO: 1989 - RNA, 21 nt, synthetic construct
  source 1..21: mol_type = other RNA
tggtcacacctgaagagaaag

SEQ ID NO: 1990 - RNA, 21 nt, synthetic construct
  source 1..21: mol_type = other RNA
cttacctccagacaagaggcc

SEQ ID NO: 1991 - RNA, 20 nt, synthetic construct
  source 1..20: mol_type = other RNA
ctccttccgacttctccaag

SEQ ID NO: 1992 - RNA, 20 nt, synthetic construct
  source 1..20: mol_type = other RNA
tccttccgacttctccaaga

SEQ ID NO: 1993 - RNA, 20 nt, synthetic construct
  source 1..20: mol_type = other RNA
tctccaagagggccaggcac

SEQ ID NO: 1994 - RNA, 20 nt, synthetic construct
  source 1..20: mol_type = other RNA
ctcaagaccaaaagactgtc

SEQ ID NO: 1995 - RNA, 20 nt, synthetic construct
  source 1..20: mol_type = other RNA
agaccaaaagactgtcagga

SEQ ID NO: 1996 - RNA, 20 nt, synthetic construct
  source 1..20: mol_type = other RNA
cctgccaagtgaatggccga

SEQ ID NO: 1997 - RNA, 20 nt, synthetic construct
  source 1..20: mol_type = other RNA
ctcccagcggcgaacgtgtc

SEQ ID NO: 1998 - RNA, 20 nt, synthetic construct
  source 1..20: mol_type = other RNA
cagcggcgaacgtgtcagga

SEQ ID NO: 1999 - RNA, 20 nt, synthetic construct
  source 1..20: mol_type = other RNA
cggcgaacgtgtcaggaagg

SEQ ID NO: 2000 - RNA, 20 nt, synthetic construct
  source 1..20: mol_type = other RNA
cgtgtcaggaaggtggctct

SEQ ID NO: 2001 - RNA, 20 nt, synthetic construct
  source 1..20: mol_type = other RNA
ttttctaccaaatgatcggt

SEQ ID NO: 2002 - RNA, 20 nt, synthetic construct
  source 1..20: mol_type = other RNA
tttctaccaaatgatcggta

SEQ ID NO: 2003 - RNA, 20 nt, synthetic construct
  source 1..20: mol_type = other RNA
gcaacaaagtaagacatact

SEQ ID NO: 2004 - RNA, 20 nt, synthetic construct
  source 1..20: mol_type = other RNA
acctctttcaagtgctgccc

SEQ ID NO: 2005 - RNA, 20 nt, synthetic construct
  source 1..20: mol_type = other RNA
gaaactccaagatgaggatt

SEQ ID NO: 2006 - RNA, 20 nt, synthetic construct
  source 1..20: mol_type = other RNA
aaactccaagatgaggattt

SEQ ID NO: 2007 - RNA, 20 nt, synthetic construct
  source 1..20: mol_type = other RNA
caccaacctgcagaggcagt

SEQ ID NO: 2008 - RNA, 20 nt, synthetic construct
  source 1..20: mol_type = other RNA
accaacctgcagaggcagtg

SEQ ID NO: 2009 - RNA, 20 nt, synthetic construct
  source 1..20: mol_type = other RNA
tgcctttctgtaggggaggt

SEQ ID NO: 2010 - RNA, 20 nt, synthetic construct
  source 1..20: mol_type = other RNA
aaatgggcctataaaggaca

SEQ ID NO: 2011 - RNA, 20 nt, synthetic construct
  source 1..20: mol_type = other RNA
ccctcctgaagtaggagagt

SEQ ID NO: 2012 - RNA, 20 nt, synthetic construct
  source 1..20: mol_type = other RNA
tggcctgccatggttgcttg

SEQ ID NO: 2013 - RNA, 20 nt, synthetic construct
  source 1..20: mol_type = other RNA
tagacatctgagggataaaa

SEQ ID NO: 2014 - RNA, 20 nt, synthetic construct
  source 1..20: mol_type = other RNA
catctgagggataaaaagga

SEQ ID NO: 2015 - RNA, 20 nt, synthetic construct
  source 1..20: mol_type = other RNA
tgcaatcctgcagaagagac

SEQ ID NO: 2016 - RNA, 20 nt, synthetic construct
  source 1..20: mol_type = other RNA
gtgcggttccagccttcagg

SEQ ID NO: 2017 - RNA, 20 nt, synthetic construct
  source 1..20: mol_type = other RNA
tgcggttccagccttcagga

SEQ ID NO: 2018 - RNA, 20 nt, synthetic construct
  source 1..20: mol_type = other RNA
gacccaaattttggggtatg

SEQ ID NO: 2019 - RNA, 20 nt, synthetic construct
  source 1..20: mol_type = other RNA
cactccatcggccattcact

SEQ ID NO: 2020 - RNA, 20 nt, synthetic construct
  source 1..20: mol_type = other RNA
gtggattgctttgagaaggg

SEQ ID NO: 2021 - RNA, 20 nt, synthetic construct
  source 1..20: mol_type = other RNA
ccccagggatcctgctctct

SEQ ID NO: 2022 - RNA, 20 nt, synthetic construct
  source 1..20: mol_type = other RNA
tcaagaccaaaagactgtca

SEQ ID NO: 2023 - RNA, 20 nt, synthetic construct
  source 1..20: mol_type = other RNA
gcacctgccaagtgaatggc

SEQ ID NO: 2024 - RNA, 20 nt, synthetic construct
  source 1..20: mol_type = other RNA
ctgccaagtgaatggccgat

SEQ ID NO: 2025 - RNA, 20 nt, synthetic construct
  source 1..20: mol_type = other RNA
gaatggccgatggagtgggc

SEQ ID NO: 2026 - RNA, 20 nt, synthetic construct
  source 1..20: mol_type = other RNA
agtgggcagacagcgatctg

SEQ ID NO: 2027 - RNA, 20 nt, synthetic construct
  source 1..20: mol_type = other RNA
ggcagccagtaccgccttga

SEQ ID NO: 2028 - RNA, 20 nt, synthetic construct
  source 1..20: mol_type = other RNA
tcccagcggcgaacgtgtca

SEQ ID NO: 2029 - RNA, 20 nt, synthetic construct
  source 1..20: mol_type = other RNA
gtgtcaggaaggtggctctt

SEQ ID NO: 2030 - RNA, 20 nt, synthetic construct
  source 1..20: mol_type = other RNA
aggggaacaacagaagcgga

SEQ ID NO: 2031 - RNA, 20 nt, synthetic construct
  source 1..20: mol_type = other RNA
cctccaggcagtgtacagca

SEQ ID NO: 2032 - RNA, 20 nt, synthetic construct
  source 1..20: mol_type = other RNA
ttctaccaaatgatcggtag

SEQ ID NO: 2033 - RNA, 20 nt, synthetic construct
  source 1..20: mol_type = other RNA
ctaccaaatgatcggtaggg

SEQ ID NO: 2034 - RNA, 20 nt, synthetic construct
  source 1..20: mol_type = other RNA
caagcaaccatggcaggcca

SEQ ID NO: 2035 - RNA, 20 nt, synthetic construct
  source 1..20: mol_type = other RNA
tatggccagactatcaggtg

SEQ ID NO: 2036 - RNA, 20 nt, synthetic construct
  source 1..20: mol_type = other RNA
cacttgccagcaacaaagta

SEQ ID NO: 2037 - RNA, 20 nt, synthetic construct
  source 1..20: mol_type = other RNA
gctcaatatgccccaggcta

SEQ ID NO: 2038 - RNA, 20 nt, synthetic construct
  source 1..20: mol_type = other RNA
ctttcaagtgctgccctggc

SEQ ID NO: 2039 - RNA, 20 nt, synthetic construct
  source 1..20: mol_type = other RNA
ccttcagccagggcagcact

SEQ ID NO: 2040 - RNA, 20 nt, synthetic construct
  source 1..20: mol_type = other RNA
cagccagggcagcacttgaa

SEQ ID NO: 2041 - RNA, 20 nt, synthetic construct
  source 1..20: mol_type = other RNA
gcctttctgtaggggaggtg

SEQ ID NO: 2042 - RNA, 20 nt, synthetic construct
  source 1..20: mol_type = other RNA
aatgggcctataaaggacaa

SEQ ID NO: 2043 - RNA, 20 nt, synthetic construct
  source 1..20: mol_type = other RNA
tgggcctataaaggacaagg

SEQ ID NO: 2044 - RNA, 20 nt, synthetic construct
  source 1..20: mol_type = other RNA
gtgttcccaaaccatgccac

SEQ ID NO: 2045 - RNA, 20 nt, synthetic construct
  source 1..20: mol_type = other RNA
gttcccaaaccatgccacag

SEQ ID NO: 2046 - RNA, 20 nt, synthetic construct
  source 1..20: mol_type = other RNA
gcggttccagccttcaggag

SEQ ID NO: 2047 - RNA, 20 nt, synthetic construct
  source 1..20: mol_type = other RNA
ttgtggtctgtggagaggga

SEQ ID NO: 2048 - RNA, 20 nt, synthetic construct
  source 1..20: mol_type = other RNA
gagtctgggagagtcagaaa

SEQ ID NO: 2049 - RNA, 20 nt, synthetic construct
  source 1..20: mol_type = other RNA
cgctccaagagccaccttcc

SEQ ID NO: 2050 - RNA, 20 nt, synthetic construct
  source 1..20: mol_type = other RNA
taccccgctgcagaggtatg

SEQ ID NO: 2051 - RNA, 20 nt, synthetic construct
  source 1..20: mol_type = other RNA
gggccagtattccccgttct

SEQ ID NO: 2052 - RNA, 20 nt, synthetic construct
  source 1..20: mol_type = other RNA
tggattgctttgagaagggg

SEQ ID NO: 2053 - RNA, 20 nt, synthetic construct
  source 1..20: mol_type = other RNA
agggtgctccaggaccccgt

SEQ ID NO: 2054 - RNA, 20 nt, synthetic construct
  source 1..20: mol_type = other RNA
cacctgaagagaaaggctga

SEQ ID NO: 2055 - DNA, 23 bp, synthetic construct
  source 1..23: mol_type = other DNA
cttctcacctccgttgtcacaga

SEQ ID NO: 2056 - DNA, 23 bp, synthetic construct
  source 1..23: mol_type = other DNA
ctgaccatcagtcatgaggatga

SEQ ID NO: 2057 - DNA, 23 bp, synthetic construct
  source 1..23: mol_type = other DNA
ctccctaccgatcatttggtaga

SEQ ID NO: 2058 - DNA, 23 bp, synthetic construct
  source 1..23: mol_type = other DNA
ttacctacgctgaccttgattga

SEQ ID NO: 2059 - DNA, 23 bp, synthetic construct
  source 1..23: mol_type = other DNA
atccttacctacgctgaccttga

SEQ ID NO: 2060 - DNA, 23 bp, synthetic construct
  source 1..23: mol_type = other DNA
tctcaccttatccccattcttga

SEQ ID NO: 2061 - DNA, 23 bp, synthetic construct
  source 1..23: mol_type = other DNA
tcgcttacctccagacaagaggc

SEQ ID NO: 2062 - DNA, 23 bp, synthetic construct
  source 1..23: mol_type = other DNA
tcacctccgttgtcacagatcgc

SEQ ID NO: 2063 - DNA, 23 bp, synthetic construct
  source 1..23: mol_type = other DNA
cttacaatgactgagatcttggc

SEQ ID NO: 2064 - DNA, 23 bp, synthetic construct
  source 1..23: mol_type = other DNA
aacctgcagaggcagtggggtgc

SEQ ID NO: 2065 - DNA, 23 bp, synthetic construct
  source 1..23: mol_type = other DNA
ctcgcttacctccagacaagagg

SEQ ID NO: 2066 - DNA, 23 bp, synthetic construct
  source 1..23: mol_type = other DNA
ccttctgaccatcagtcatgagg

SEQ ID NO: 2067 - DNA, 23 bp, synthetic construct
  source 1..23: mol_type = other DNA
tcacccagataatcctcccttgg

SEQ ID NO: 2068 - DNA, 23 bp, synthetic construct
  source 1..23: mol_type = other DNA
gcttacaatgactgagatcttgg

SEQ ID NO: 2069 - DNA, 23 bp, synthetic construct
  source 1..23: mol_type = other DNA
cttactttgttgctggcaagtgg

SEQ ID NO: 2070 - DNA, 23 bp, synthetic construct
  source 1..23: mol_type = other DNA
tctcacctctgcaagtattgggg

SEQ ID NO: 2071 - DNA, 23 bp, synthetic construct
  source 1..23: mol_type = other DNA
ccctcgcttacctccagacaaga

SEQ ID NO: 2072 - DNA, 23 bp, synthetic construct
  source 1..23: mol_type = other DNA
cttctcacctccgttgtcacaga

SEQ ID NO: 2073 - DNA, 23 bp, synthetic construct
  source 1..23: mol_type = other DNA
ggtcaaaggtcaccttggcagga

SEQ ID NO: 2074 - DNA, 23 bp, synthetic construct
  source 1..23: mol_type = other DNA
ttccaccttctcaattaagttga

SEQ ID NO: 2075 - DNA, 23 bp, synthetic construct
  source 1..23: mol_type = other DNA
taacctctgaccttcataattga

SEQ ID NO: 2076 - DNA, 23 bp, synthetic construct
  source 1..23: mol_type = other DNA
ctgaccatcagtcatgaggatga

SEQ ID NO: 2077 - DNA, 23 bp, synthetic construct
  source 1..23: mol_type = other DNA
cttctgaccatcagtcatgagga

SEQ ID NO: 2078 - DNA, 23 bp, synthetic construct
  source 1..23: mol_type = other DNA
tcccttctgaccatcagtcatga

SEQ ID NO: 2079 - DNA, 23 bp, synthetic construct
  source 1..23: mol_type = other DNA
ctccctaccgatcatttggtaga

SEQ ID NO: 2080 - DNA, 23 bp, synthetic construct
  source 1..23: mol_type = other DNA
ttctgtgcttacaatgactgaga

SEQ ID NO: 2081 - DNA, 23 bp, synthetic construct
  source 1..23: mol_type = other DNA
ttacctacgctgaccttgattga

SEQ ID NO: 2082 - DNA, 23 bp, synthetic construct
  source 1..23: mol_type = other DNA
atccttacctacgctgaccttga

SEQ ID NO: 2083 - DNA, 23 bp, synthetic construct
  source 1..23: mol_type = other DNA
tctcaccttatccccattcttga

SEQ ID NO: 2084 - DNA, 23 bp, synthetic construct
  source 1..23: mol_type = other DNA
gaggactcacttgaatgaaacga

SEQ ID NO: 2085 - DNA, 23 bp, synthetic construct
  source 1..23: mol_type = other DNA
tcaaagcaatccactgtccaaga

SEQ ID NO: 2086 - DNA, 23 bp, synthetic construct
  source 1..23: mol_type = other DNA
ctcccagactccttcatgtacga

SEQ ID NO: 2087 - DNA, 23 bp, synthetic construct
  source 1..23: mol_type = other DNA
ctggcacccaggggaacaacaga

SEQ ID NO: 2088 - DNA, 23 bp, synthetic construct
  source 1..23: mol_type = other DNA
cccaggggaacaacagaagcgga

SEQ ID NO: 2089 - DNA, 23 bp, synthetic construct
  source 1..23: mol_type = other DNA
acaggtggcaagttatggtgtga

SEQ ID NO: 2090 - DNA, 23 bp, synthetic construct
  source 1..23: mol_type = other DNA
cctctccacagaccacaagttga

SEQ ID NO: 2091 - DNA, 23 bp, synthetic construct
  source 1..23: mol_type = other DNA
gccagatgaaagccagtctctga

SEQ ID NO: 2092 - DNA, 23 bp, synthetic construct
  source 1..23: mol_type = other DNA
gtccccagcgcccttcaaaggga

SEQ ID NO: 2093 - DNA, 23 bp, synthetic construct
  source 1..23: mol_type = other DNA
acttcaggaggggagaagcggga

SEQ ID NO: 2094 - DNA, 23 bp, synthetic construct
  source 1..23: mol_type = other DNA
cccctacagaaaggcagctgtga

SEQ ID NO: 2095 - DNA, 23 bp, synthetic construct
  source 1..23: mol_type = other DNA
cctacagaaaggcagctgtgaga

SEQ ID NO: 2096 - DNA, 23 bp, synthetic construct
  source 1..23: mol_type = other DNA
tacagaaaggcagctgtgagaga

SEQ ID NO: 2097 - DNA, 23 bp, synthetic construct
  source 1..23: mol_type = other DNA
ttccaccttctcaattaagttga

SEQ ID NO: 2098 - DNA, 23 bp, synthetic construct
  source 1..23: mol_type = other DNA
cttctgaccatcagtcatgagga

SEQ ID NO: 2099 - DNA, 23 bp, synthetic construct
  source 1..23: mol_type = other DNA
acttcaggaggggagaagcggga

SEQ ID NO: 2100 - DNA, 23 bp, synthetic construct
  source 1..23: mol_type = other DNA
cccctacagaaaggcagctgtga

SEQ ID NO: 2101 - DNA, 23 bp, synthetic construct
  source 1..23: mol_type = other DNA
cctacagaaaggcagctgtgaga

SEQ ID NO: 2102 - DNA, 23 bp, synthetic construct
  source 1..23: mol_type = other DNA
tcgcttacctccagacaagaggc

SEQ ID NO: 2103 - DNA, 23 bp, synthetic construct
  source 1..23: mol_type = other DNA
gccctcaaacctctgcactctgc

SEQ ID NO: 2104 - DNA, 23 bp, synthetic construct
  source 1..23: mol_type = other DNA
tcacctccgttgtcacagatcgc

SEQ ID NO: 2105 - DNA, 23 bp, synthetic construct
  source 1..23: mol_type = other DNA
aaaggtcaccttggcaggaaggc

SEQ ID NO: 2106 - DNA, 23 bp, synthetic construct
  source 1..23: mol_type = other DNA
ctgtcttcaaacctgggccgtgc

SEQ ID NO: 2107 - DNA, 23 bp, synthetic construct
  source 1..23: mol_type = other DNA
cttacaatgactgagatcttggc

SEQ ID NO: 2108 - DNA, 23 bp, synthetic construct
  source 1..23: mol_type = other DNA
acgctctcacctgatagtctggc

SEQ ID NO: 2109 - DNA, 23 bp, synthetic construct
  source 1..23: mol_type = other DNA
gtatgtcttactttgttgctggc

SEQ ID NO: 2110 - DNA, 23 bp, synthetic construct
  source 1..23: mol_type = other DNA
atacctctgcagcggggtactgc

SEQ ID NO: 2111 - DNA, 23 bp, synthetic construct
  source 1..23: mol_type = other DNA
gcacccaggggaacaacagaagc

SEQ ID NO: 2112 - DNA, 23 bp, synthetic construct
  source 1..23: mol_type = other DNA
ctgcaggattgcacaacatgggc

SEQ ID NO: 2113 - DNA, 23 bp, synthetic construct
  source 1..23: mol_type = other DNA
tcctacttcaggaggggagaagc

SEQ ID NO: 2114 - DNA, 23 bp, synthetic construct
  source 1..23: mol_type = other DNA
ataggcccatttgtctcccctgc

SEQ ID NO: 2115 - DNA, 23 bp, synthetic construct
  source 1..23: mol_type = other DNA
tattcgtccagaggaagagctgc

SEQ ID NO: 2116 - DNA, 23 bp, synthetic construct
  source 1..23: mol_type = other DNA
ccagaggaagagctgctccctgc

SEQ ID NO: 2117 - DNA, 23 bp, synthetic construct
  source 1..23: mol_type = other DNA
ctctccttgcaggtgattctggc

SEQ ID NO: 2118 - DNA, 23 bp, synthetic construct
  source 1..23: mol_type = other DNA
tccttgcaggtgattctggcggc

SEQ ID NO: 2119 - DNA, 23 bp, synthetic construct
  source 1..23: mol_type = other DNA
ctctgcaggttggtgtaatcagc

SEQ ID NO: 2120 - DNA, 23 bp, synthetic construct
  source 1..23: mol_type = other DNA
gccctcaaacctctgcactctgc

SEQ ID NO: 2121 - DNA, 23 bp, synthetic construct
  source 1..23: mol_type = other DNA
aaaggtcaccttggcaggaaggc

SEQ ID NO: 2122 - DNA, 23 bp, synthetic construct
  source 1..23: mol_type = other DNA
gcacccaggggaacaacagaagc

SEQ ID NO: 2123 - DNA, 23 bp, synthetic construct
  source 1..23: mol_type = other DNA
ccagaggaagagctgctccctgc

SEQ ID NO: 2124 - DNA, 23 bp, synthetic construct
  source 1..23: mol_type = other DNA
tccttgcaggtgattctggcggc

SEQ ID NO: 2125 - DNA, 23 bp, synthetic construct
  source 1..23: mol_type = other DNA
ctcgcttacctccagacaagagg

SEQ ID NO: 2126 - DNA, 23 bp, synthetic construct
  source 1..23: mol_type = other DNA
caaaggtcaccttggcaggaagg

SEQ ID NO: 2127 - DNA, 23 bp, synthetic construct
  source 1..23: mol_type = other DNA
ccttctgaccatcagtcatgagg

SEQ ID NO: 2128 - DNA, 23 bp, synthetic construct
  source 1..23: mol_type = other DNA
tcacccagataatcctcccttgg

SEQ ID NO: 2129 - DNA, 23 bp, synthetic construct
  source 1..23: mol_type = other DNA
gtatctccctaccgatcatttgg

SEQ ID NO: 2130 - DNA, 23 bp, synthetic construct
  source 1..23: mol_type = other DNA
gcttacaatgactgagatcttgg

SEQ ID NO: 2131 - DNA, 23 bp, synthetic construct
  source 1..23: mol_type = other DNA
gacgctctcacctgatagtctgg

SEQ ID NO: 2132 - DNA, 23 bp, synthetic construct
  source 1..23: mol_type = other DNA
cttactttgttgctggcaagtgg

SEQ ID NO: 2133 - DNA, 23 bp, synthetic construct
  source 1..23: mol_type = other DNA
agtatgtcttactttgttgctgg

SEQ ID NO: 2134 - DNA, 23 bp, synthetic construct
  source 1..23: mol_type = other DNA
tctcacctctgcaagtattgggg

SEQ ID NO: 2135 - DNA, 23 bp, synthetic construct
  source 1..23: mol_type = other DNA
ctctcacctctgcaagtattggg

SEQ ID NO: 2136 - DNA, 23 bp, synthetic construct
  source 1..23: mol_type = other DNA
tctctcacctctgcaagtattgg

SEQ ID NO: 2137 - DNA, 23 bp, synthetic construct
  source 1..23: mol_type = other DNA
acccaggggaacaacagaagcgg

SEQ ID NO: 2138 - DNA, 23 bp, synthetic construct
  source 1..23: mol_type = other DNA
cacccacaggtggcaagttatgg

SEQ ID NO: 2139 - DNA, 23 bp, synthetic construct
  source 1..23: mol_type = other DNA
acagaccacaagttgaagtcagg

SEQ ID NO: 2140 - DNA, 23 bp, synthetic construct
  source 1..23: mol_type = other DNA
ttctgcaggattgcacaacatgg

SEQ ID NO: 2141 - DNA, 23 bp, synthetic construct
  source 1..23: mol_type = other DNA
tctgcaggattgcacaacatggg

SEQ ID NO: 2142 - DNA, 23 bp, synthetic construct
  source 1..23: mol_type = other DNA
gcaggattgcacaacatgggcgg

SEQ ID NO: 2143 - DNA, 23 bp, synthetic construct
  source 1..23: mol_type = other DNA
ccctcagatgtctatgtgtttgg

SEQ ID NO: 2144 - DNA, 23 bp, synthetic construct
  source 1..23: mol_type = other DNA
cctcagatgtctatgtgtttggg

SEQ ID NO: 2145 - DNA, 23 bp, synthetic construct
  source 1..23: mol_type = other DNA
ctcagatgtctatgtgtttgggg

SEQ ID NO: 2146 - DNA, 23 bp, synthetic construct
  source 1..23: mol_type = other DNA
gtgtccccagcgcccttcaaagg

SEQ ID NO: 2147 - DNA, 23 bp, synthetic construct
  source 1..23: mol_type = other DNA
tgtccccagcgcccttcaaaggg

SEQ ID NO: 2148 - DNA, 23 bp, synthetic construct
  source 1..23: mol_type = other DNA
ctacttcaggaggggagaagcgg

SEQ ID NO: 2149 - DNA, 23 bp, synthetic construct
  source 1..23: mol_type = other DNA
tacttcaggaggggagaagcggg

SEQ ID NO: 2150 - DNA, 23 bp, synthetic construct
  source 1..23: mol_type = other DNA
cctctccttgcaggtgattctgg

SEQ ID NO: 2151 - DNA, 23 bp, synthetic construct
  source 1..23: mol_type = other DNA
ctccttgcaggtgattctggcgg

SEQ ID NO: 2152 - DNA, 23 bp, synthetic construct
  source 1..23: mol_type = other DNA
tgcaggttggtgtaatcagctgg

SEQ ID NO: 2153 - DNA, 23 bp, synthetic construct
  source 1..23: mol_type = other DNA
gcaggttggtgtaatcagctggg

SEQ ID NO: 2154 - DNA, 23 bp, synthetic construct
  source 1..23: mol_type = other DNA
ctctcacctctgcaagtattggg

SEQ ID NO: 2155 - DNA, 23 bp, synthetic construct
  source 1..23: mol_type = other DNA
tctctcacctctgcaagtattgg

SEQ ID NO: 2156 - DNA, 23 bp, synthetic construct
  source 1..23: mol_type = other DNA
acccaggggaacaacagaagcgg

SEQ ID NO: 2157 - DNA, 23 bp, synthetic construct
  source 1..23: mol_type = other DNA
ttctgcaggattgcacaacatgg

SEQ ID NO: 2158 - DNA, 27 bp, synthetic construct
  source 1..27: mol_type = other DNA
tcccttctgaccatcagtcatgaggat

SEQ ID NO: 2159 - DNA, 27 bp, synthetic construct
  source 1..27: mol_type = other DNA
actcacccagataatcctcccttgggt

SEQ ID NO: 2160 - DNA, 27 bp, synthetic construct
  source 1..27: mol_type = other DNA
ccttacctacgctgaccttgattgagt

SEQ ID NO: 2161 - DNA, 27 bp, synthetic construct
  source 1..27: mol_type = other DNA
gtttctcaccttatccccattcttgat

SEQ ID NO: 2162 - DNA, 27 bp, synthetic construct
  source 1..27: mol_type = other DNA
ttctctcacctctgcaagtattggggt

SEQ ID NO: 2163 - DNA, 27 bp, synthetic construct
  source 1..27: mol_type = other DNA
cctcacccacaggtggcaagttatggt

SEQ ID NO: 2164 - DNA, 27 bp, synthetic construct
  source 1..27: mol_type = other DNA
tccctcagatgtctatgtgtttggggt

SEQ ID NO: 2165 - DNA, 27 bp, synthetic construct
  source 1..27: mol_type = other DNA
ctccttctctgccagatgaaagccagt

SEQ ID NO: 2166 - DNA, 27 bp, synthetic construct
  source 1..27: mol_type = other DNA
ctgccagatgaaagccagtctctgagt

SEQ ID NO: 2167 - DNA, 26 bp, synthetic construct
  source 1..26: mol_type = other DNA
attgccctcaaacctctgcactctgc

SEQ ID NO: 2168 - DNA, 26 bp, synthetic construct
  source 1..26: mol_type = other DNA
attctgtgcttacaatgactgagatc

SEQ ID NO: 2169 - DNA, 26 bp, synthetic construct
  source 1..26: mol_type = other DNA
gttgcatccttacctacgctgacctt

SEQ ID NO: 2170 - DNA, 26 bp, synthetic construct
  source 1..26: mol_type = other DNA
attctctcacctctgcaagtattggg

SEQ ID NO: 2171 - DNA, 26 bp, synthetic construct
  source 1..26: mol_type = other DNA
ctttctcttcaggtgtgaccaccact

SEQ ID NO: 2172 - DNA, 26 bp, synthetic construct
  source 1..26: mol_type = other DNA
cttctcaaagcaatccactgtccaag

SEQ ID NO: 2173 - DNA, 26 bp, synthetic construct
  source 1..26: mol_type = other DNA
cttctctgccagatgaaagccagtct

SEQ ID NO: 2174 - DNA, 26 bp, synthetic construct
  source 1..26: mol_type = other DNA
gttgtgtccccagcgcccttcaaagg

SEQ ID NO: 2175 - DNA, 26 bp, synthetic construct
  source 1..26: mol_type = other DNA
cttgtcctttataggcccatttgtct

SEQ ID NO: 2176 - DNA, 26 bp, synthetic construct
  source 1..26: mol_type = other DNA
attcgtccagaggaagagctgctccc

SEQ ID NO: 2177 - DNA, 27 bp, synthetic construct
  source 1..27: mol_type = other DNA
tcccttctgaccatcagtcatgaggat

SEQ ID NO: 2178 - DNA, 27 bp, synthetic construct
  source 1..27: mol_type = other DNA
actcacccagataatcctcccttgggt

SEQ ID NO: 2179 - DNA, 27 bp, synthetic construct
  source 1..27: mol_type = other DNA
ccttacctacgctgaccttgattgagt

SEQ ID NO: 2180 - DNA, 27 bp, synthetic construct
  source 1..27: mol_type = other DNA
ttctctcacctctgcaagtattggggt

SEQ ID NO: 2181 - DNA, 27 bp, synthetic construct
  source 1..27: mol_type = other DNA
atgcttctcacctccgttgtcacagat

SEQ ID NO: 2182 - DNA, 27 bp, synthetic construct
  source 1..27: mol_type = other DNA
tgttgttcccctgggtgccaggagagt

SEQ ID NO: 2183 - DNA, 27 bp, synthetic construct
  source 1..27: mol_type = other DNA
cttctgaccatcagtcatgaggatgat

SEQ ID NO: 2184 - DNA, 27 bp, synthetic construct
  source 1..27: mol_type = other DNA
tcccttctgaccatcagtcatgaggat

SEQ ID NO: 2185 - DNA, 27 bp, synthetic construct
  source 1..27: mol_type = other DNA
actcacccagataatcctcccttgggt

SEQ ID NO: 2186 - DNA, 27 bp, synthetic construct
  source 1..27: mol_type = other DNA
gacatctgagggataaaaaggaaggat

SEQ ID NO: 2187 - DNA, 27 bp, synthetic construct
  source 1..27: mol_type = other DNA
ggctttcatctggcagagaaggagaat

SEQ ID NO: 2188 - DNA, 27 bp, synthetic construct
  source 1..27: mol_type = other DNA
ccttacctacgctgaccttgattgagt

SEQ ID NO: 2189 - DNA, 27 bp, synthetic construct
  source 1..27: mol_type = other DNA
tgcatccttacctacgctgaccttgat

SEQ ID NO: 2190 - DNA, 27 bp, synthetic construct
  source 1..27: mol_type = other DNA
tgtcttactttgttgctggcaagtggt

SEQ ID NO: 2191 - DNA, 27 bp, synthetic construct
  source 1..27: mol_type = other DNA
gtatgtcttactttgttgctggcaagt

SEQ ID NO: 2192 - DNA, 27 bp, synthetic construct
  source 1..27: mol_type = other DNA
gtttctcaccttatccccattcttgat

SEQ ID NO: 2193 - DNA, 27 bp, synthetic construct
  source 1..27: mol_type = other DNA
ttctctcacctctgcaagtattggggt

SEQ ID NO: 2194 - DNA, 27 bp, synthetic construct
  source 1..27: mol_type = other DNA
tacaccaacctgcagaggcagtggggt

SEQ ID NO: 2195 - DNA, 23 bp, synthetic construct
  source 1..23: mol_type = other DNA
cacctgaagagaaaggctgatga

SEQ ID NO: 2196 - DNA, 23 bp, synthetic construct
  source 1..23: mol_type = other DNA
tggattgctttgagaagggggga

SEQ ID NO: 2197 - DNA, 23 bp, synthetic construct
  source 1..23: mol_type = other DNA
taccccgctgcagaggtatgaga

SEQ ID NO: 2198 - DNA, 23 bp, synthetic construct
  source 1..23: mol_type = other DNA
gagtctgggagagtcagaaatga

SEQ ID NO: 2199 - DNA, 23 bp, synthetic construct
  source 1..23: mol_type = other DNA
tgggcctataaaggacaaggaga

SEQ ID NO: 2200 - DNA, 23 bp, synthetic construct
  source 1..23: mol_type = other DNA
aatgggcctataaaggacaagga

SEQ ID NO: 2201 - DNA, 23 bp, synthetic construct
  source 1..23: mol_type = other DNA
gcctttctgtaggggaggtggga

SEQ ID NO: 2202 - DNA, 23 bp, synthetic construct
  source 1..23: mol_type = other DNA
gtggattgctttgagaagggggg

SEQ ID NO: 2203 - DNA, 23 bp, synthetic construct
  source 1..23: mol_type = other DNA
tgcaatcctgcagaagagacagg

SEQ ID NO: 2204 - DNA, 23 bp, synthetic construct
  source 1..23: mol_type = other DNA
catctgagggataaaaaggaagg

SEQ ID NO: 2205 - DNA, 23 bp, synthetic construct
  source 1..23: mol_type = other DNA
tagacatctgagggataaaaagg

SEQ ID NO: 2206 - DNA, 23 bp, synthetic construct
  source 1..23: mol_type = other DNA
ccctcctgaagtaggagagtagg

SEQ ID NO: 2207 - DNA, 23 bp, synthetic construct
  source 1..23: mol_type = other DNA
aaatgggcctataaaggacaagg

SEQ ID NO: 2208 - DNA, 23 bp, synthetic construct
  source 1..23: mol_type = other DNA
tgcctttctgtaggggaggtggg

SEQ ID NO: 2209 - DNA, 23 bp, synthetic construct
  source 1..23: mol_type = other DNA
accaacctgcagaggcagtgggg

SEQ ID NO: 2210 - DNA, 23 bp, synthetic construct
  source 1..23: mol_type = other DNA
cttctcacctccgttgtcacaga

SEQ ID NO: 2211 - DNA, 23 bp, synthetic construct
  source 1..23: mol_type = other DNA
cttctcacctccgttgtcacaga

SEQ ID NO: 2212 - DNA, 23 bp, synthetic construct
  source 1..23: mol_type = other DNA
ctgaccatcagtcatgaggatga

SEQ ID NO: 2213 - DNA, 23 bp, synthetic construct
  source 1..23: mol_type = other DNA
ctgaccatcagtcatgaggatga

SEQ ID NO: 2214 - DNA, 23 bp, synthetic construct
  source 1..23: mol_type = other DNA
ctccctaccgatcatttggtaga

SEQ ID NO: 2215 - DNA, 23 bp, synthetic construct
  source 1..23: mol_type = other DNA
ctccctaccgatcatttggtaga

SEQ ID NO: 2216 - DNA, 23 bp, synthetic construct
  source 1..23: mol_type = other DNA
ttacctacgctgaccttgattga

SEQ ID NO: 2217 - DNA, 23 bp, synthetic construct
  source 1..23: mol_type = other DNA
ttacctacgctgaccttgattga

SEQ ID NO: 2218 - DNA, 23 bp, synthetic construct
  source 1..23: mol_type = other DNA
atccttacctacgctgaccttga

SEQ ID NO: 2219 - DNA, 23 bp, synthetic construct
  source 1..23: mol_type = other DNA
atccttacctacgctgaccttga

SEQ ID NO: 2220 - DNA, 23 bp, synthetic construct
  source 1..23: mol_type = other DNA
tctcaccttatccccattcttga

SEQ ID NO: 2221 - DNA, 23 bp, synthetic construct
  source 1..23: mol_type = other DNA
tctcaccttatccccattcttga

SEQ ID NO: 2222 - DNA, 23 bp, synthetic construct
  source 1..23: mol_type = other DNA
gaggactcacttgaatgaaacga

SEQ ID NO: 2223 - DNA, 23 bp, synthetic construct
  source 1..23: mol_type = other DNA
gaggactcacttgaatgaaacga

SEQ ID NO: 2224 - DNA, 23 bp, synthetic construct
  source 1..23: mol_type = other DNA
tcaaagcaatccactgtccaaga

SEQ ID NO: 2225 - DNA, 23 bp, synthetic construct
  source 1..23: mol_type = other DNA
tcaaagcaatccactgtccaaga

SEQ ID NO: 2226 - DNA, 23 bp, synthetic construct
  source 1..23: mol_type = other DNA
ctcccagactccttcatgtacga

SEQ ID NO: 2227 - DNA, 23 bp, synthetic construct
  source 1..23: mol_type = other DNA
ctcccagactccttcatgtacga

SEQ ID NO: 2228 - DNA, 23 bp, synthetic construct
  source 1..23: mol_type = other DNA
cccaggggaacaacagaagcgga

SEQ ID NO: 2229 - DNA, 23 bp, synthetic construct
  source 1..23: mol_type = other DNA
cccaggggaacaacagaagcgga

SEQ ID NO: 2230 - DNA, 23 bp, synthetic construct
  source 1..23: mol_type = other DNA
acaggtggcaagttatggtgtga

SEQ ID NO: 2231 - DNA, 23 bp, synthetic construct
  source 1..23: mol_type = other DNA
acaggtggcaagttatggtgtga

SEQ ID NO: 2232 - DNA, 23 bp, synthetic construct
  source 1..23: mol_type = other DNA
gccagatgaaagccagtctctga

SEQ ID NO: 2233 - DNA, 23 bp, synthetic construct
  source 1..23: mol_type = other DNA
gccagatgaaagccagtctctga

SEQ ID NO: 2234 - DNA, 23 bp, synthetic construct
  source 1..23: mol_type = other DNA
gtccccagcgcccttcaaaggga

SEQ ID NO: 2235 - DNA, 23 bp, synthetic construct
  source 1..23: mol_type = other DNA
gtccccagcgcccttcaaaggga

SEQ ID NO: 2236 - DNA, 23 bp, synthetic construct
  source 1..23: mol_type = other DNA
tacagaaaggcagctgtgagaga

SEQ ID NO: 2237 - DNA, 23 bp, synthetic construct
  source 1..23: mol_type = other DNA
tacagaaaggcagctgtgagaga

SEQ ID NO: 2238 - DNA, 23 bp, synthetic construct
  source 1..23: mol_type = other DNA
tcgcttacctccagacaagaggc

SEQ ID NO: 2239 - DNA, 23 bp, synthetic construct
  source 1..23: mol_type = other DNA
tcgcttacctccagacaagaggc

SEQ ID NO: 2240 - DNA, 23 bp, synthetic construct
  source 1..23: mol_type = other DNA
tcacctccgttgtcacagatcgc

SEQ ID NO: 2241 - DNA, 23 bp, synthetic construct
  source 1..23: mol_type = other DNA
tcacctccgttgtcacagatcgc

SEQ ID NO: 2242 - DNA, 23 bp, synthetic construct
  source 1..23: mol_type = other DNA
cttacaatgactgagatcttggc

SEQ ID NO: 2243 - DNA, 23 bp, synthetic construct
  source 1..23: mol_type = other DNA
cttacaatgactgagatcttggc

SEQ ID NO: 2244 - DNA, 23 bp, synthetic construct
  source 1..23: mol_type = other DNA
acgctctcacctgatagtctggc

SEQ ID NO: 2245 - DNA, 23 bp, synthetic construct
  source 1..23: mol_type = other DNA
acgctctcacctgatagtctggc

SEQ ID NO: 2246 - DNA, 23 bp, synthetic construct
  source 1..23: mol_type = other DNA
ctgcaggattgcacaacatgggc

SEQ ID NO: 2247 - DNA, 23 bp, synthetic construct
  source 1..23: mol_type = other DNA
ctgcaggattgcacaacatgggc

SEQ ID NO: 2248 - DNA, 23 bp, synthetic construct
  source 1..23: mol_type = other DNA
ataggcccatttgtctcccctgc

SEQ ID NO: 2249 - DNA, 23 bp, synthetic construct
  source 1..23: mol_type = other DNA
ataggcccatttgtctcccctgc

SEQ ID NO: 2250 - DNA, 23 bp, synthetic construct
  source 1..23: mol_type = other DNA
ctctgcaggttggtgtaatcagc

SEQ ID NO: 2251 - DNA, 23 bp, synthetic construct
  source 1..23: mol_type = other DNA
ctctgcaggttggtgtaatcagc

SEQ ID NO: 2252 - DNA, 23 bp, synthetic construct
  source 1..23: mol_type = other DNA
ctcgcttacctccagacaagagg

SEQ ID NO: 2253 - DNA, 23 bp, synthetic construct
  source 1..23: mol_type = other DNA
ctcgcttacctccagacaagagg

SEQ ID NO: 2254 - DNA, 23 bp, synthetic construct
  source 1..23: mol_type = other DNA
caaaggtcaccttggcaggaagg

SEQ ID NO: 2255 - DNA, 23 bp, synthetic construct
  source 1..23: mol_type = other DNA
caaaggtcaccttggcaggaagg

SEQ ID NO: 2256 - DNA, 23 bp, synthetic construct
  source 1..23: mol_type = other DNA
ccttctgaccatcagtcatgagg

SEQ ID NO: 2257 - DNA, 23 bp, synthetic construct
  source 1..23: mol_type = other DNA
ccttctgaccatcagtcatgagg

SEQ ID NO: 2258 - DNA, 23 bp, synthetic construct
  source 1..23: mol_type = other DNA
tcacccagataatcctcccttgg

SEQ ID NO: 2259 - DNA, 23 bp, synthetic construct
  source 1..23: mol_type = other DNA
tcacccagataatcctcccttgg

SEQ ID NO: 2260 - DNA, 23 bp, synthetic construct
  source 1..23: mol_type = other DNA
gcttacaatgactgagatcttgg

SEQ ID NO: 2261 - DNA, 23 bp, synthetic construct
  source 1..23: mol_type = other DNA
gcttacaatgactgagatcttgg

SEQ ID NO: 2262 - DNA, 23 bp, synthetic construct
  source 1..23: mol_type = other DNA
cttactttgttgctggcaagtgg

SEQ ID NO: 2263 - DNA, 23 bp, synthetic construct
  source 1..23: mol_type = other DNA
cttactttgttgctggcaagtgg

SEQ ID NO: 2264 - DNA, 23 bp, synthetic construct
  source 1..23: mol_type = other DNA
tctcacctctgcaagtattgggg

SEQ ID NO: 2265 - DNA, 23 bp, synthetic construct
  source 1..23: mol_type = other DNA
tctcacctctgcaagtattgggg

SEQ ID NO: 2266 - DNA, 23 bp, synthetic construct
  source 1..23: mol_type = other DNA
cacccacaggtggcaagttatgg

SEQ ID NO: 2267 - DNA, 23 bp, synthetic construct
  source 1..23: mol_type = other DNA
cacccacaggtggcaagttatgg

SEQ ID NO: 2268 - DNA, 23 bp, synthetic construct
  source 1..23: mol_type = other DNA
acagaccacaagttgaagtcagg

SEQ ID NO: 2269 - DNA, 23 bp, synthetic construct
  source 1..23: mol_type = other DNA
acagaccacaagttgaagtcagg

SEQ ID NO: 2270 - DNA, 23 bp, synthetic construct
  source 1..23: mol_type = other DNA
tctgcaggattgcacaacatggg

SEQ ID NO: 2271 - DNA, 23 bp, synthetic construct
  source 1..23: mol_type = other DNA
tctgcaggattgcacaacatggg

SEQ ID NO: 2272 - DNA, 23 bp, synthetic construct
  source 1..23: mol_type = other DNA
gcaggattgcacaacatgggcgg

SEQ ID NO: 2273 - DNA, 23 bp, synthetic construct
  source 1..23: mol_type = other DNA
gcaggattgcacaacatgggcgg

SEQ ID NO: 2274 - DNA, 23 bp, synthetic construct
  source 1..23: mol_type = other DNA
ccctcagatgtctatgtgtttgg

SEQ ID NO: 2275 - DNA, 23 bp, synthetic construct
  source 1..23: mol_type = other DNA
ccctcagatgtctatgtgtttgg

SEQ ID NO: 2276 - DNA, 23 bp, synthetic construct
  source 1..23: mol_type = other DNA
cctcagatgtctatgtgtttggg

SEQ ID NO: 2277 - DNA, 23 bp, synthetic construct
  source 1..23: mol_type = other DNA
cctcagatgtctatgtgtttggg

SEQ ID NO: 2278 - DNA, 23 bp, synthetic construct
  source 1..23: mol_type = other DNA
ctcagatgtctatgtgtttgggg

SEQ ID NO: 2279 - DNA, 23 bp, synthetic construct
  source 1..23: mol_type = other DNA
ctcagatgtctatgtgtttgggg

SEQ ID NO: 2280 - DNA, 23 bp, synthetic construct
  source 1..23: mol_type = other DNA
gtgtccccagcgcccttcaaagg

SEQ ID NO: 2281 - DNA, 23 bp, synthetic construct
  source 1..23: mol_type = other DNA
gtgtccccagcgcccttcaaagg

SEQ ID NO: 2282 - DNA, 23 bp, synthetic construct
  source 1..23: mol_type = other DNA
tgtccccagcgcccttcaaaggg

SEQ ID NO: 2283 - DNA, 23 bp, synthetic construct
  source 1..23: mol_type = other DNA
tgtccccagcgcccttcaaaggg

SEQ ID NO: 2284 - DNA, 23 bp, synthetic construct
  source 1..23: mol_type = other DNA
ctacttcaggaggggagaagcgg

SEQ ID NO: 2285 - DNA, 23 bp, synthetic construct
  source 1..23: mol_type = other DNA
ctacttcaggaggggagaagcgg

SEQ ID NO: 2286 - DNA, 23 bp, synthetic construct
  source 1..23: mol_type = other DNA
tacttcaggaggggagaagcggg

SEQ ID NO: 2287 - DNA, 23 bp, synthetic construct
  source 1..23: mol_type = other DNA
tacttcaggaggggagaagcggg

SEQ ID NO: 2288 - DNA, 23 bp, synthetic construct
  source 1..23: mol_type = other DNA
ctccttgcaggtgattctggcgg

SEQ ID NO: 2289 - DNA, 23 bp, synthetic construct
  source 1..23: mol_type = other DNA
ctccttgcaggtgattctggcgg

SEQ ID NO: 2290 - DNA, 23 bp, synthetic construct
  source 1..23: mol_type = other DNA
tgcaggttggtgtaatcagctgg

SEQ ID NO: 2291 - DNA, 23 bp, synthetic construct
  source 1..23: mol_type = other DNA
tgcaggttggtgtaatcagctgg

SEQ ID NO: 2292 - DNA, 23 bp, synthetic construct
  source 1..23: mol_type = other DNA
gcaggttggtgtaatcagctggg

SEQ ID NO: 2293 - DNA, 23 bp, synthetic construct
  source 1..23: mol_type = other DNA
gcaggttggtgtaatcagctggg

SEQ ID NO: 2294 - DNA, 27 bp, synthetic construct
  source 1..27: mol_type = other DNA
tcccttctgaccatcagtcatgaggat

SEQ ID NO: 2295 - DNA, 27 bp, synthetic construct
  source 1..27: mol_type = other DNA
tcccttctgaccatcagtcatgaggat

SEQ ID NO: 2296 - DNA, 27 bp, synthetic construct
  source 1..27: mol_type = other DNA
actcacccagataatcctcccttgggt

SEQ ID NO: 2297 - DNA, 27 bp, synthetic construct
  source 1..27: mol_type = other DNA
actcacccagataatcctcccttgggt

SEQ ID NO: 2298 - DNA, 27 bp, synthetic construct
  source 1..27: mol_type = other DNA
ccttacctacgctgaccttgattgagt

SEQ ID NO: 2299 - DNA, 27 bp, synthetic construct
  source 1..27: mol_type = other DNA
ccttacctacgctgaccttgattgagt

SEQ ID NO: 2300 - DNA, 27 bp, synthetic construct
  source 1..27: mol_type = other DNA
ttctctcacctctgcaagtattggggt

SEQ ID NO: 2301 - DNA, 27 bp, synthetic construct
  source 1..27: mol_type = other DNA
ttctctcacctctgcaagtattggggt

SEQ ID NO: 2302 - DNA, 27 bp, synthetic construct
  source 1..27: mol_type = other DNA
tccctcagatgtctatgtgtttggggt

SEQ ID NO: 2303 - DNA, 27 bp, synthetic construct
  source 1..27: mol_type = other DNA
tccctcagatgtctatgtgtttggggt

SEQ ID NO: 2304 - DNA, 27 bp, synthetic construct
  source 1..27: mol_type = other DNA
ctgccagatgaaagccagtctctgagt

SEQ ID NO: 2305 - DNA, 27 bp, synthetic construct
  source 1..27: mol_type = other DNA
ctgccagatgaaagccagtctctgagt

SEQ ID NO: 2306 - DNA, 27 bp, synthetic construct
  source 1..27: mol_type = other DNA
atgcttctcacctccgttgtcacagat

SEQ ID NO: 2307 - DNA, 27 bp, synthetic construct
  source 1..27: mol_type = other DNA
atgcttctcacctccgttgtcacagat

SEQ ID NO: 2308 - DNA, 27 bp, synthetic construct
  source 1..27: mol_type = other DNA
aggaggattccaccttctcaattaagt

SEQ ID NO: 2309 - DNA, 27 bp, synthetic construct
  source 1..27: mol_type = other DNA
aggaggattccaccttctcaattaagt

SEQ ID NO: 2310 - DNA, 27 bp, synthetic construct
  source 1..27: mol_type = other DNA
ccctaacctctgaccttcataattgat

SEQ ID NO: 2311 - DNA, 27 bp, synthetic construct
  source 1..27: mol_type = other DNA
ccctaacctctgaccttcataattgat

SEQ ID NO: 2312 - DNA, 27 bp, synthetic construct
  source 1..27: mol_type = other DNA
cttctgaccatcagtcatgaggatgat

SEQ ID NO: 2313 - DNA, 27 bp, synthetic construct
  source 1..27: mol_type = other DNA
cttctgaccatcagtcatgaggatgat

SEQ ID NO: 2314 - DNA, 27 bp, synthetic construct
  source 1..27: mol_type = other DNA
cttgtatctccctaccgatcatttggt

SEQ ID NO: 2315 - DNA, 27 bp, synthetic construct
  source 1..27: mol_type = other DNA
cttgtatctccctaccgatcatttggt

SEQ ID NO: 2316 - DNA, 27 bp, synthetic construct
  source 1..27: mol_type = other DNA
ggattctgtgcttacaatgactgagat

SEQ ID NO: 2317 - DNA, 27 bp, synthetic construct
  source 1..27: mol_type = other DNA
ggattctgtgcttacaatgactgagat

SEQ ID NO: 2318 - DNA, 27 bp, synthetic construct
  source 1..27: mol_type = other DNA
tgcatccttacctacgctgaccttgat

SEQ ID NO: 2319 - DNA, 27 bp, synthetic construct
  source 1..27: mol_type = other DNA
tgcatccttacctacgctgaccttgat

SEQ ID NO: 2320 - DNA, 27 bp, synthetic construct
  source 1..27: mol_type = other DNA
tgtcttactttgttgctggcaagtggt

SEQ ID NO: 2321 - DNA, 27 bp, synthetic construct
  source 1..27: mol_type = other DNA
tgtcttactttgttgctggcaagtggt

SEQ ID NO: 2322 - DNA, 27 bp, synthetic construct
  source 1..27: mol_type = other DNA
gtatgtcttactttgttgctggcaagt

SEQ ID NO: 2323 - DNA, 27 bp, synthetic construct
  source 1..27: mol_type = other DNA
gtatgtcttactttgttgctggcaagt

SEQ ID NO: 2324 - DNA, 27 bp, synthetic construct
  source 1..27: mol_type = other DNA
cttcaggtgtgaccaccactccatggt

SEQ ID NO: 2325 - DNA, 27 bp, synthetic construct
  source 1..27: mol_type = other DNA
cttcaggtgtgaccaccactccatggt

SEQ ID NO: 2326 - DNA, 27 bp, synthetic construct
  source 1..27: mol_type = other DNA
ccctctccacagaccacaagttgaagt

SEQ ID NO: 2327 - DNA, 27 bp, synthetic construct
  source 1..27: mol_type = other DNA
ccctctccacagaccacaagttgaagt

SEQ ID NO: 2328 - DNA, 27 bp, synthetic construct
  source 1..27: mol_type = other DNA
ctacagaaaggcagctgtgagagagat

SEQ ID NO: 2329 - DNA, 27 bp, synthetic construct
  source 1..27: mol_type = other DNA
ctacagaaaggcagctgtgagagagat

SEQ ID NO: 2330 - DNA, 27 bp, synthetic construct
  source 1..27: mol_type = other DNA
tgttgttcccctgggtgccaggagagt

SEQ ID NO: 2331 - DNA, 27 bp, synthetic construct
  source 1..27: mol_type = other DNA
tgttgttcccctgggtgccaggagagt

SEQ ID NO: 2332 - DNA, 27 bp, synthetic construct
  source 1..27: mol_type = other DNA
gacatctgagggataaaaaggaaggat

SEQ ID NO: 2333 - DNA, 27 bp, synthetic construct
  source 1..27: mol_type = other DNA
gacatctgagggataaaaaggaaggat

SEQ ID NO: 2334 - DNA, 27 bp, synthetic construct
  source 1..27: mol_type = other DNA
ggctttcatctggcagagaaggagaat

SEQ ID NO: 2335 - DNA, 27 bp, synthetic construct
  source 1..27: mol_type = other DNA
ggctttcatctggcagagaaggagaat

SEQ ID NO: 2336 - DNA, 27 bp, synthetic construct
  source 1..27: mol_type = other DNA
tacaccaacctgcagaggcagtggggt

SEQ ID NO: 2337 - DNA, 27 bp, synthetic construct
  source 1..27: mol_type = other DNA
tacaccaacctgcagaggcagtggggt

SEQ ID NO: 2338 - DNA, 27 bp, synthetic construct
  source 1..27: mol_type = other DNA
cttacctccagacaagaggcccaagat

SEQ ID NO: 2339 - DNA, 27 bp, synthetic construct
  source 1..27: mol_type = other DNA
cttacctccagacaagaggcccaagat

SEQ ID NO: 2340 - DNA, 27 bp, synthetic construct
  source 1..27: mol_type = other DNA
tggtcacacctgaagagaaaggctgat

SEQ ID NO: 2341 - DNA, 27 bp, synthetic construct
  source 1..27: mol_type = other DNA
tggtcacacctgaagagaaaggctgat

SEQ ID NO: 2342 - DNA, 27 bp, synthetic construct
  source 1..27: mol_type = other DNA
ggattgctttgagaaggggggacaagt

SEQ ID NO: 2343 - DNA, 27 bp, synthetic construct
  source 1..27: mol_type = other DNA
ggattgctttgagaaggggggacaagt

SEQ ID NO: 2344 - DNA, 27 bp, synthetic construct
  source 1..27: mol_type = other DNA
cgctgcagaggtatgagacatcgaggt

SEQ ID NO: 2345 - DNA, 27 bp, synthetic construct
  source 1..27: mol_type = other DNA
cgctgcagaggtatgagacatcgaggt

SEQ ID NO: 2346 - DNA, 27 bp, synthetic construct
  source 1..27: mol_type = other DNA
ggagtctgggagagtcagaaatgaggt

SEQ ID NO: 2347 - DNA, 27 bp, synthetic construct
  source 1..27: mol_type = other DNA
ggagtctgggagagtcagaaatgaggt

SEQ ID NO: 2348 - DNA, 27 bp, synthetic construct
  source 1..27: mol_type = other DNA
atgaaggagtctgggagagtcagaaat

SEQ ID NO: 2349 - DNA, 27 bp, synthetic construct
  source 1..27: mol_type = other DNA
atgaaggagtctgggagagtcagaaat

SEQ ID NO: 2350 - DNA, 27 bp, synthetic construct
  source 1..27: mol_type = other DNA
tttgaagggcgctggggacacaacagt

SEQ ID NO: 2351 - DNA, 27 bp, synthetic construct
  source 1..27: mol_type = other DNA
tttgaagggcgctggggacacaacagt

SEQ ID NO: 2352 - DNA, 27 bp, synthetic construct
  source 1..27: mol_type = other DNA
ctcccctcctgaagtaggagagtaggt

SEQ ID NO: 2353 - DNA, 27 bp, synthetic construct
  source 1..27: mol_type = other DNA
ctcccctcctgaagtaggagagtaggt

SEQ ID NO: 2354 - DNA, 27 bp, synthetic construct
  source 1..27: mol_type = other DNA
cttactttgttgctggcaagtggtagt

SEQ ID NO: 2355 - DNA, 27 bp, synthetic construct
  source 1..27: mol_type = other DNA
cttactttgttgctggcaagtggtagt

SEQ ID NO: 2356 - DNA, 23 bp, synthetic construct
  source 1..23: mol_type = other DNA
actccatcggccattcacttggc

SEQ ID NO: 2357 - DNA, 23 bp, synthetic construct
  source 1..23: mol_type = other DNA
acccaaattttggggtatgtggc

SEQ ID NO: 2358 - DNA, 23 bp, synthetic construct
  source 1..23: mol_type = other DNA
cgtgacccagtctgcattactgc

SEQ ID NO: 2359 - DNA, 23 bp, synthetic construct
  source 1..23: mol_type = other DNA
gaccaaaagactgtcaggaaggc

SEQ ID NO: 2360 - DNA, 23 bp, synthetic construct
  source 1..23: mol_type = other DNA
ggccgatggagtgggcagacagc

SEQ ID NO: 2361 - DNA, 23 bp, synthetic construct
  source 1..23: mol_type = other DNA
acccctcaagaggtggccgaagc

SEQ ID NO: 2362 - DNA, 23 bp, synthetic construct
  source 1..23: mol_type = other DNA
aggccctccaggcagtgtacagc

SEQ ID NO: 2363 - DNA, 23 bp, synthetic construct
  source 1..23: mol_type = other DNA
tggccagactatcaggtgagagc

SEQ ID NO: 2364 - DNA, 23 bp, synthetic construct
  source 1..23: mol_type = other DNA
caacaaagtaagacatacttggc

SEQ ID NO: 2365 - DNA, 23 bp, synthetic construct
  source 1..23: mol_type = other DNA
caaaagcaggtacctgctcacgc

SEQ ID NO: 2366 - DNA, 23 bp, synthetic construct
  source 1..23: mol_type = other DNA
cctctttcaagtgctgccctggc

SEQ ID NO: 2367 - DNA, 27 bp, synthetic construct
  source 1..27: mol_type = other DNA
gagaaactccaagatgaggatttgggt

SEQ ID NO: 2368 - DNA, 27 bp, synthetic construct
  source 1..27: mol_type = other DNA
ctgccatggttgcttgtggtaatcggt

SEQ ID NO: 2369 - DNA, 27 bp, synthetic construct
  source 1..27: mol_type = other DNA
ttctccaagagggccaggcactggagt

SEQ ID NO: 2370 - DNA, 27 bp, synthetic construct
  source 1..27: mol_type = other DNA
accctgtgcagacacgtacctgcagat

SEQ ID NO: 2371 - DNA, 27 bp, synthetic construct
  source 1..27: mol_type = other DNA
accaaaagactgtcaggaaggcagagt

SEQ ID NO: 2372 - DNA, 27 bp, synthetic construct
  source 1..27: mol_type = other DNA
acctgccaagtgaatggccgatggagt

SEQ ID NO: 2373 - DNA, 27 bp, synthetic construct
  source 1..27: mol_type = other DNA
agacaatgagcaacatgtgttcaaagt

SEQ ID NO: 2374 - DNA, 27 bp, synthetic construct
  source 1..27: mol_type = other DNA
gagcaacatgtgttcaaagtcaaggat

SEQ ID NO: 2375 - DNA, 27 bp, synthetic construct
  source 1..27: mol_type = other DNA
ccacaagcaaccatggcaggccaagat

SEQ ID NO: 2376 - DNA, 27 bp, synthetic construct
  source 1..27: mol_type = other DNA
caaaaaccagaagcggcaaaagcaggt

SEQ ID NO: 2377 - DNA, 27 bp, synthetic construct
  source 1..27: mol_type = other DNA
gagaaactccaagatgaggatttgggt

SEQ ID NO: 2378 - DNA, 23 bp, synthetic construct
  source 1..23: mol_type = other DNA
agggtgctccaggaccccgtaga

SEQ ID NO: 2379 - DNA, 23 bp, synthetic construct
  source 1..23: mol_type = other DNA
gggccagtattccccgttctcga

SEQ ID NO: 2380 - DNA, 23 bp, synthetic construct
  source 1..23: mol_type = other DNA
cgctccaagagccaccttcctga

SEQ ID NO: 2381 - DNA, 23 bp, synthetic construct
  source 1..23: mol_type = other DNA
gcggttccagccttcaggaggga

SEQ ID NO: 2382 - DNA, 23 bp, synthetic construct
  source 1..23: mol_type = other DNA
gttcccaaaccatgccacagaga

SEQ ID NO: 2383 - DNA, 23 bp, synthetic construct
  source 1..23: mol_type = other DNA
gtgttcccaaaccatgccacaga

SEQ ID NO: 2384 - DNA, 23 bp, synthetic construct
  source 1..23: mol_type = other DNA
cagccagggcagcacttgaaaga

SEQ ID NO: 2385 - DNA, 23 bp, synthetic construct
  source 1..23: mol_type = other DNA
ccttcagccagggcagcacttga

SEQ ID NO: 2386 - DNA, 23 bp, synthetic construct
  source 1..23: mol_type = other DNA
ccccagggatcctgctctctgga

SEQ ID NO: 2387 - DNA, 23 bp, synthetic construct
  source 1..23: mol_type = other DNA
tcaagaccaaaagactgtcagga

SEQ ID NO: 2388 - DNA, 23 bp, synthetic construct
  source 1..23: mol_type = other DNA
gcacctgccaagtgaatggccga

SEQ ID NO: 2389 - DNA, 23 bp, synthetic construct
  source 1..23: mol_type = other DNA
ctgccaagtgaatggccgatgga

SEQ ID NO: 2390 - DNA, 23 bp, synthetic construct
  source 1..23: mol_type = other DNA
gaatggccgatggagtgggcaga

SEQ ID NO: 2391 - DNA, 23 bp, synthetic construct
  source 1..23: mol_type = other DNA
agtgggcagacagcgatctgtga

SEQ ID NO: 2392 - DNA, 23 bp, synthetic construct
  source 1..23: mol_type = other DNA
ggcagccagtaccgccttgaaga

SEQ ID NO: 2393 - DNA, 23 bp, synthetic construct
  source 1..23: mol_type = other DNA
tcccagcggcgaacgtgtcagga

SEQ ID NO: 2394 - DNA, 23 bp, synthetic construct
  source 1..23: mol_type = other DNA
gtgtcaggaaggtggctcttgga

SEQ ID NO: 2395 - DNA, 23 bp, synthetic construct
  source 1..23: mol_type = other DNA
aggggaacaacagaagcggaaga

SEQ ID NO: 2396 - DNA, 23 bp, synthetic construct
  source 1..23: mol_type = other DNA
cctccaggcagtgtacagcatga

SEQ ID NO: 2397 - DNA, 23 bp, synthetic construct
  source 1..23: mol_type = other DNA
ttctaccaaatgatcggtaggga

SEQ ID NO: 2398 - DNA, 23 bp, synthetic construct
  source 1..23: mol_type = other DNA
ctaccaaatgatcggtagggaga

SEQ ID NO: 2399 - DNA, 23 bp, synthetic construct
  source 1..23: mol_type = other DNA
caagcaaccatggcaggccaaga

SEQ ID NO: 2400 - DNA, 23 bp, synthetic construct
  source 1..23: mol_type = other DNA
tatggccagactatcaggtgaga

SEQ ID NO: 2401 - DNA, 23 bp, synthetic construct
  source 1..23: mol_type = other DNA
cacttgccagcaacaaagtaaga

SEQ ID NO: 2402 - DNA, 23 bp, synthetic construct
  source 1..23: mol_type = other DNA
gctcaatatgccccaggctatga

SEQ ID NO: 2403 - DNA, 23 bp, synthetic construct
  source 1..23: mol_type = other DNA
ctttcaagtgctgccctggctga

SEQ ID NO: 2404 - DNA, 23 bp, synthetic construct
  source 1..23: mol_type = other DNA
cactccatcggccattcacttgg

SEQ ID NO: 2405 - DNA, 23 bp, synthetic construct
  source 1..23: mol_type = other DNA
gacccaaattttggggtatgtgg

SEQ ID NO: 2406 - DNA, 23 bp, synthetic construct
  source 1..23: mol_type = other DNA
tgcggttccagccttcaggaggg

SEQ ID NO: 2407 - DNA, 23 bp, synthetic construct
  source 1..23: mol_type = other DNA
gtgcggttccagccttcaggagg

SEQ ID NO: 2408 - DNA, 23 bp, synthetic construct
  source 1..23: mol_type = other DNA
tggcctgccatggttgcttgtgg

SEQ ID NO: 2409 - DNA, 23 bp, synthetic construct
  source 1..23: mol_type = other DNA
ctccttccgacttctccaagagg

SEQ ID NO: 2410 - DNA, 23 bp, synthetic construct
  source 1..23: mol_type = other DNA
tccttccgacttctccaagaggg

SEQ ID NO: 2411 - DNA, 23 bp, synthetic construct
  source 1..23: mol_type = other DNA
tctccaagagggccaggcactgg

SEQ ID NO: 2412 - DNA, 23 bp, synthetic construct
  source 1..23: mol_type = other DNA
ctcaagaccaaaagactgtcagg

SEQ ID NO: 2413 - DNA, 23 bp, synthetic construct
  source 1..23: mol_type = other DNA
agaccaaaagactgtcaggaagg

SEQ ID NO: 2414 - DNA, 23 bp, synthetic construct
  source 1..23: mol_type = other DNA
cctgccaagtgaatggccgatgg

SEQ ID NO: 2415 - DNA, 23 bp, synthetic construct
  source 1..23: mol_type = other DNA
ctcccagcggcgaacgtgtcagg

SEQ ID NO: 2416 - DNA, 23 bp, synthetic construct
  source 1..23: mol_type = other DNA
cagcggcgaacgtgtcaggaagg

SEQ ID NO: 2417 - DNA, 23 bp, synthetic construct
  source 1..23: mol_type = other DNA
cggcgaacgtgtcaggaaggtgg

SEQ ID NO: 2418 - DNA, 23 bp, synthetic construct
  source 1..23: mol_type = other DNA
cgtgtcaggaaggtggctcttgg

SEQ ID NO: 2419 - DNA, 23 bp, synthetic construct
  source 1..23: mol_type = other DNA
ttttctaccaaatgatcggtagg

SEQ ID NO: 2420 - DNA, 23 bp, synthetic construct
  source 1..23: mol_type = other DNA
tttctaccaaatgatcggtaggg

SEQ ID NO: 2421 - DNA, 23 bp, synthetic construct
  source 1..23: mol_type = other DNA
gcaacaaagtaagacatacttgg

SEQ ID NO: 2422 - DNA, 23 bp, synthetic construct
  source 1..23: mol_type = other DNA
acctctttcaagtgctgccctgg

SEQ ID NO: 2423 - DNA, 23 bp, synthetic construct
  source 1..23: mol_type = other DNA
gaaactccaagatgaggatttgg

SEQ ID NO: 2424 - DNA, 23 bp, synthetic construct
  source 1..23: mol_type = other DNA
aaactccaagatgaggatttggg

SEQ ID NO: 2425 - DNA, 27 bp, synthetic construct
  source 1..27: mol_type = other DNA
ttctccaagagggccaggcactggagt

SEQ ID NO: 2426 - DNA, 27 bp, synthetic construct
  source 1..27: mol_type = other DNA
ttctccaagagggccaggcactggagt

SEQ ID NO: 2427 - DNA, 27 bp, synthetic construct
  source 1..27: mol_type = other DNA
accaaaagactgtcaggaaggcagagt

SEQ ID NO: 2428 - DNA, 27 bp, synthetic construct
  source 1..27: mol_type = other DNA
accaaaagactgtcaggaaggcagagt

SEQ ID NO: 2429 - DNA, 27 bp, synthetic construct
  source 1..27: mol_type = other DNA
acctgccaagtgaatggccgatggagt

SEQ ID NO: 2430 - DNA, 27 bp, synthetic construct
  source 1..27: mol_type = other DNA
acctgccaagtgaatggccgatggagt

SEQ ID NO: 2431 - DNA, 27 bp, synthetic construct
  source 1..27: mol_type = other DNA
gagcaacatgtgttcaaagtcaaggat

SEQ ID NO: 2432 - DNA, 27 bp, synthetic construct
  source 1..27: mol_type = other DNA
gagcaacatgtgttcaaagtcaaggat

SEQ ID NO: 2433 - DNA, 27 bp, synthetic construct
  source 1..27: mol_type = other DNA
gctccaggaccccgtagatctgcaggt

SEQ ID NO: 2434 - DNA, 27 bp, synthetic construct
  source 1..27: mol_type = other DNA
gctccaggaccccgtagatctgcaggt

SEQ ID NO: 2435 - DNA, 27 bp, synthetic construct
  source 1..27: mol_type = other DNA
ttcagggtgctccaggaccccgtagat

SEQ ID NO: 2436 - DNA, 27 bp, synthetic construct
  source 1..27: mol_type = other DNA
ttcagggtgctccaggaccccgtagat

SEQ ID NO: 2437 - DNA, 27 bp, synthetic construct
  source 1..27: mol_type = other DNA
ggggccagtattccccgttctcgaagt

SEQ ID NO: 2438 - DNA, 27 bp, synthetic construct
  source 1..27: mol_type = other DNA
ggggccagtattccccgttctcgaagt

SEQ ID NO: 2439 - DNA, 27 bp, synthetic construct
  source 1..27: mol_type = other DNA
actccatcggccattcacttggcaggt

SEQ ID NO: 2440 - DNA, 27 bp, synthetic construct
  source 1..27: mol_type = other DNA
actccatcggccattcacttggcaggt

SEQ ID NO: 2441 - DNA, 27 bp, synthetic construct
  source 1..27: mol_type = other DNA
tggcctgccatggttgcttgtggtaat

SEQ ID NO: 2442 - DNA, 27 bp, synthetic construct
  source 1..27: mol_type = other DNA
tggcctgccatggttgcttgtggtaat

SEQ ID NO: 2443 - DNA, 27 bp, synthetic construct
  source 1..27: mol_type = other DNA
tcttggcctgccatggttgcttgtggt

SEQ ID NO: 2444 - DNA, 27 bp, synthetic construct
  source 1..27: mol_type = other DNA
tcttggcctgccatggttgcttgtggt

SEQ ID NO: 2445 - DNA, 27 bp, synthetic construct
  source 1..27: mol_type = other DNA
tcagccagggcagcacttgaaagaggt

SEQ ID NO: 2446 - DNA, 27 bp, synthetic construct
  source 1..27: mol_type = other DNA
tcagccagggcagcacttgaaagaggt

SEQ ID NO: 2447 - DNA, 27 bp, synthetic construct
  source 1..27: mol_type = other DNA
atcgcacctgccaagtgaatggccgat

SEQ ID NO: 2448 - DNA, 27 bp, synthetic construct
  source 1..27: mol_type = other DNA
atcgcacctgccaagtgaatggccgat

SEQ ID NO: 2449 - DNA, 27 bp, synthetic construct
  source 1..27: mol_type = other DNA
tggccgatggagtgggcagacagcgat

SEQ ID NO: 2450 - DNA, 27 bp, synthetic construct
  source 1..27: mol_type = other DNA
tggccgatggagtgggcagacagcgat

SEQ ID NO: 2451 - DNA, 27 bp, synthetic construct
  source 1..27: mol_type = other DNA
tcccagcggcgaacgtgtcaggaaggt

SEQ ID NO: 2452 - DNA, 27 bp, synthetic construct
  source 1..27: mol_type = other DNA
tcccagcggcgaacgtgtcaggaaggt

SEQ ID NO: 2453 - DNA, 27 bp, synthetic construct
  source 1..27: mol_type = other DNA
cccaggggaacaacagaagcggaagat

SEQ ID NO: 2454 - DNA, 27 bp, synthetic construct
  source 1..27: mol_type = other DNA
cccaggggaacaacagaagcggaagat

SEQ ID NO: 2455 - DNA, 27 bp, synthetic construct
  source 1..27: mol_type = other DNA
gtcacgaagcagctcaatgaaatcaat

SEQ ID NO: 2456 - DNA, 27 bp, synthetic construct
  source 1..27: mol_type = other DNA
gtcacgaagcagctcaatgaaatcaat

SEQ ID NO: 2457 - DNA, 27 bp, synthetic construct
  source 1..27: mol_type = other DNA
ggccctccaggcagtgtacagcatgat

SEQ ID NO: 2458 - DNA, 27 bp, synthetic construct
  source 1..27: mol_type = other DNA
ggccctccaggcagtgtacagcatgat

SEQ ID NO: 2459 - DNA, 27 bp, synthetic construct
  source 1..27: mol_type = other DNA
tttctaccaaatgatcggtagggagat

SEQ ID NO: 2460 - DNA, 27 bp, synthetic construct
  source 1..27: mol_type = other DNA
tttctaccaaatgatcggtagggagat

SEQ ID NO: 2461 - DNA, 27 bp, synthetic construct
  source 1..27: mol_type = other DNA
gcaaccatggcaggccaagatctcagt

SEQ ID NO: 2462 - DNA, 27 bp, synthetic construct
  source 1..27: mol_type = other DNA
gcaaccatggcaggccaagatctcagt

SEQ ID NO: 2463 - RNA, 20 nt, synthetic construct
  source 1..20: mol_type = other RNA
cttctcacctccgttgtcac

SEQ ID NO: 2464 - RNA, 20 nt, synthetic construct
  source 1..20: mol_type = other RNA
ctgaccatcagtcatgagga

SEQ ID NO: 2465 - RNA, 20 nt, synthetic construct
  source 1..20: mol_type = other RNA
ctccctaccgatcatttggt

SEQ ID NO: 2466 - RNA, 20 nt, synthetic construct
  source 1..20: mol_type = other RNA
ttacctacgctgaccttgat

SEQ ID NO: 2467 - RNA, 20 nt, synthetic construct
  source 1..20: mol_type = other RNA
atccttacctacgctgacct

SEQ ID NO: 2468 - RNA, 20 nt, synthetic construct
  source 1..20: mol_type = other RNA
tctcaccttatccccattct

SEQ ID NO: 2469 - RNA, 20 nt, synthetic construct
  source 1..20: mol_type = other RNA
tcgcttacctccagacaaga

SEQ ID NO: 2470 - RNA, 20 nt, synthetic construct
  source 1..20: mol_type = other RNA
tcacctccgttgtcacagat

SEQ ID NO: 2471 - RNA, 20 nt, synthetic construct
  source 1..20: mol_type = other RNA
cttacaatgactgagatctt

SEQ ID NO: 2472 - RNA, 20 nt, synthetic construct
  source 1..20: mol_type = other RNA
aacctgcagaggcagtgggg

SEQ ID NO: 2473 - RNA, 20 nt, synthetic construct
  source 1..20: mol_type = other RNA
ctcgcttacctccagacaag

SEQ ID NO: 2474 - RNA, 20 nt, synthetic construct
  source 1..20: mol_type = other RNA
ccttctgaccatcagtcatg

SEQ ID NO: 2475 - RNA, 20 nt, synthetic construct
  source 1..20: mol_type = other RNA
tcacccagataatcctccct

SEQ ID NO: 2476 - RNA, 20 nt, synthetic construct
  source 1..20: mol_type = other RNA
gcttacaatgactgagatct

SEQ ID NO: 2477 - RNA, 20 nt, synthetic construct
  source 1..20: mol_type = other RNA
cttactttgttgctggcaag

SEQ ID NO: 2478 - RNA, 20 nt, synthetic construct
  source 1..20: mol_type = other RNA
tctcacctctgcaagtattg

SEQ ID NO: 2479 - RNA, 20 nt, synthetic construct
  source 1..20: mol_type = other RNA
ccctcgcttacctccagaca

SEQ ID NO: 2480 - RNA, 20 nt, synthetic construct
  source 1..20: mol_type = other RNA
cttctcacctccgttgtcac

SEQ ID NO: 2481 - RNA, 20 nt, synthetic construct
  source 1..20: mol_type = other RNA
ggtcaaaggtcaccttggca

SEQ ID NO: 2482 - RNA, 20 nt, synthetic construct
  source 1..20: mol_type = other RNA
ttccaccttctcaattaagt

SEQ ID NO: 2483 - RNA, 20 nt, synthetic construct
  source 1..20: mol_type = other RNA
taacctctgaccttcataat

SEQ ID NO: 2484 - RNA, 20 nt, synthetic construct
  source 1..20: mol_type = other RNA
ctgaccatcagtcatgagga

SEQ ID NO: 2485 - RNA, 20 nt, synthetic construct
  source 1..20: mol_type = other RNA
cttctgaccatcagtcatga

SEQ ID NO: 2486 - RNA, 20 nt, synthetic construct
  source 1..20: mol_type = other RNA
tcccttctgaccatcagtca

SEQ ID NO: 2487 - RNA, 20 nt, synthetic construct
  source 1..20: mol_type = other RNA
ctccctaccgatcatttggt

SEQ ID NO: 2488 - RNA, 20 nt, synthetic construct
  source 1..20: mol_type = other RNA
ttctgtgcttacaatgactg

SEQ ID NO: 2489 - RNA, 20 nt, synthetic construct
  source 1..20: mol_type = other RNA
ttacctacgctgaccttgat

SEQ ID NO: 2490 - RNA, 20 nt, synthetic construct
  source 1..20: mol_type = other RNA
atccttacctacgctgacct

SEQ ID NO: 2491 - RNA, 20 nt, synthetic construct
  source 1..20: mol_type = other RNA
tctcaccttatccccattct

SEQ ID NO: 2492 - RNA, 20 nt, synthetic construct
  source 1..20: mol_type = other RNA
gaggactcacttgaatgaaa

SEQ ID NO: 2493 - RNA, 20 nt, synthetic construct
  source 1..20: mol_type = other RNA
tcaaagcaatccactgtcca

SEQ ID NO: 2494 - RNA, 20 nt, synthetic construct
  source 1..20: mol_type = other RNA
ctcccagactccttcatgta

SEQ ID NO: 2495 - RNA, 20 nt, synthetic construct
  source 1..20: mol_type = other RNA
ctggcacccaggggaacaac

SEQ ID NO: 2496 - RNA, 20 nt, synthetic construct
  source 1..20: mol_type = other RNA
cccaggggaacaacagaagc

SEQ ID NO: 2497 - RNA, 20 nt, synthetic construct
  source 1..20: mol_type = other RNA
acaggtggcaagttatggtg

SEQ ID NO: 2498 - RNA, 20 nt, synthetic construct
  source 1..20: mol_type = other RNA
cctctccacagaccacaagt

SEQ ID NO: 2499 - RNA, 20 nt, synthetic construct
  source 1..20: mol_type = other RNA
gccagatgaaagccagtctc

SEQ ID NO: 2500 - RNA, 20 nt, synthetic construct
  source 1..20: mol_type = other RNA
gtccccagcgcccttcaaag

SEQ ID NO: 2501 - RNA, 20 nt, synthetic construct
  source 1..20: mol_type = other RNA
acttcaggaggggagaagcg

SEQ ID NO: 2502 - RNA, 20 nt, synthetic construct
  source 1..20: mol_type = other RNA
cccctacagaaaggcagctg

SEQ ID NO: 2503 - RNA, 20 nt, synthetic construct
  source 1..20: mol_type = other RNA
cctacagaaaggcagctgtg

SEQ ID NO: 2504 - RNA, 20 nt, synthetic construct
  source 1..20: mol_type = other RNA
tacagaaaggcagctgtgag

SEQ ID NO: 2505 - RNA, 20 nt, synthetic construct
  source 1..20: mol_type = other RNA
ttccaccttctcaattaagt

SEQ ID NO: 2506 - RNA, 20 nt, synthetic construct
  source 1..20: mol_type = other RNA
cttctgaccatcagtcatga

SEQ ID NO: 2507 - RNA, 20 nt, synthetic construct
  source 1..20: mol_type = other RNA
acttcaggaggggagaagcg

SEQ ID NO: 2508 - RNA, 20 nt, synthetic construct
  source 1..20: mol_type = other RNA
cccctacagaaaggcagctg

SEQ ID NO: 2509 - RNA, 20 nt, synthetic construct
  source 1..20: mol_type = other RNA
cctacagaaaggcagctgtg

SEQ ID NO: 2510 - RNA, 20 nt, synthetic construct
  source 1..20: mol_type = other RNA
tcgcttacctccagacaaga

SEQ ID NO: 2511 - RNA, 20 nt, synthetic construct
  source 1..20: mol_type = other RNA
gccctcaaacctctgcactc

SEQ ID NO: 2512 - RNA, 20 nt, synthetic construct
  source 1..20: mol_type = other RNA
tcacctccgttgtcacagat

SEQ ID NO: 2513 - RNA, 20 nt, synthetic construct
  source 1..20: mol_type = other RNA
aaaggtcaccttggcaggaa

SEQ ID NO: 2514 - RNA, 20 nt, synthetic construct
  source 1..20: mol_type = other RNA
ctgtcttcaaacctgggccg

SEQ ID NO: 2515 - RNA, 20 nt, synthetic construct
  source 1..20: mol_type = other RNA
cttacaatgactgagatctt

SEQ ID NO: 2516 - RNA, 20 nt, synthetic construct
  source 1..20: mol_type = other RNA
acgctctcacctgatagtct

SEQ ID NO: 2517 - RNA, 20 nt, synthetic construct
  source 1..20: mol_type = other RNA
gtatgtcttactttgttgct

SEQ ID NO: 2518 - RNA, 20 nt, synthetic construct
  source 1..20: mol_type = other RNA
atacctctgcagcggggtac

SEQ ID NO: 2519 - RNA, 20 nt, synthetic construct
  source 1..20: mol_type = other RNA
gcacccaggggaacaacaga

SEQ ID NO: 2520 - RNA, 20 nt, synthetic construct
  source 1..20: mol_type = other RNA
ctgcaggattgcacaacatg

SEQ ID NO: 2521 - RNA, 20 nt, synthetic construct
  source 1..20: mol_type = other RNA
tcctacttcaggaggggaga

SEQ ID NO: 2522 - RNA, 20 nt, synthetic construct
  source 1..20: mol_type = other RNA
ataggcccatttgtctcccc

SEQ ID NO: 2523 - RNA, 20 nt, synthetic construct
  source 1..20: mol_type = other RNA
tattcgtccagaggaagagc

SEQ ID NO: 2524 - RNA, 20 nt, synthetic construct
  source 1..20: mol_type = other RNA
ccagaggaagagctgctccc

SEQ ID NO: 2525 - RNA, 20 nt, synthetic construct
  source 1..20: mol_type = other RNA
ctctccttgcaggtgattct

SEQ ID NO: 2526 - RNA, 20 nt, synthetic construct
  source 1..20: mol_type = other RNA
tccttgcaggtgattctggc

SEQ ID NO: 2527 - RNA, 20 nt, synthetic construct
  source 1..20: mol_type = other RNA
ctctgcaggttggtgtaatc

SEQ ID NO: 2528 - RNA, 20 nt, synthetic construct
  source 1..20: mol_type = other RNA
gccctcaaacctctgcactc

SEQ ID NO: 2529 - RNA, 20 nt, synthetic construct
  source 1..20: mol_type = other RNA
aaaggtcaccttggcaggaa

SEQ ID NO: 2530 - RNA, 20 nt, synthetic construct
  source 1..20: mol_type = other RNA
gcacccaggggaacaacaga

SEQ ID NO: 2531 - RNA, 20 nt, synthetic construct
  source 1..20: mol_type = other RNA
ccagaggaagagctgctccc

SEQ ID NO: 2532 - RNA, 20 nt, synthetic construct
  source 1..20: mol_type = other RNA
tccttgcaggtgattctggc

SEQ ID NO: 2533 - RNA, 20 nt, synthetic construct
  source 1..20: mol_type = other RNA
ctcgcttacctccagacaag

SEQ ID NO: 2534 - RNA, 20 nt, synthetic construct
  source 1..20: mol_type = other RNA
caaaggtcaccttggcagga

SEQ ID NO: 2535 - RNA, 20 nt, synthetic construct
  source 1..20: mol_type = other RNA
ccttctgaccatcagtcatg

SEQ ID NO: 2536 - RNA, 20 nt, synthetic construct
  source 1..20: mol_type = other RNA
tcacccagataatcctccct

SEQ ID NO: 2537 - RNA, 20 nt, synthetic construct
  source 1..20: mol_type = other RNA
gtatctccctaccgatcatt

SEQ ID NO: 2538 - RNA, 20 nt, synthetic construct
  source 1..20: mol_type = other RNA
gcttacaatgactgagatct

SEQ ID NO: 2539 - RNA, 20 nt, synthetic construct
  source 1..20: mol_type = other RNA
gacgctctcacctgatagtc

SEQ ID NO: 2540 - RNA, 20 nt, synthetic construct
  source 1..20: mol_type = other RNA
cttactttgttgctggcaag

SEQ ID NO: 2541 - RNA, 20 nt, synthetic construct
  source 1..20: mol_type = other RNA
agtatgtcttactttgttgc

SEQ ID NO: 2542 - RNA, 20 nt, synthetic construct
  source 1..20: mol_type = other RNA
tctcacctctgcaagtattg

SEQ ID NO: 2543 - RNA, 20 nt, synthetic construct
  source 1..20: mol_type = other RNA
ctctcacctctgcaagtatt

SEQ ID NO: 2544 - RNA, 20 nt, synthetic construct
  source 1..20: mol_type = other RNA
tctctcacctctgcaagtat

SEQ ID NO: 2545 - RNA, 20 nt, synthetic construct
  source 1..20: mol_type = other RNA
acccaggggaacaacagaag

SEQ ID NO: 2546 - RNA, 20 nt, synthetic construct
  source 1..20: mol_type = other RNA
cacccacaggtggcaagtta

SEQ ID NO: 2547 - RNA, 20 nt, synthetic construct
  source 1..20: mol_type = other RNA
acagaccacaagttgaagtc

SEQ ID NO: 2548 - RNA, 20 nt, synthetic construct
  source 1..20: mol_type = other RNA
ttctgcaggattgcacaaca

SEQ ID NO: 2549 - RNA, 20 nt, synthetic construct
  source 1..20: mol_type = other RNA
tctgcaggattgcacaacat

SEQ ID NO: 2550 - RNA, 20 nt, synthetic construct
  source 1..20: mol_type = other RNA
gcaggattgcacaacatggg

SEQ ID NO: 2551 - RNA, 20 nt, synthetic construct
  source 1..20: mol_type = other RNA
ccctcagatgtctatgtgtt

SEQ ID NO: 2552 - RNA, 20 nt, synthetic construct
  source 1..20: mol_type = other RNA
cctcagatgtctatgtgttt

SEQ ID NO: 2553 - RNA, 20 nt, synthetic construct
  source 1..20: mol_type = other RNA
ctcagatgtctatgtgtttg

SEQ ID NO: 2554 - RNA, 20 nt, synthetic construct
  source 1..20: mol_type = other RNA
gtgtccccagcgcccttcaa

SEQ ID NO: 2555 - RNA, 20 nt, synthetic construct
  source 1..20: mol_type = other RNA
tgtccccagcgcccttcaaa

SEQ ID NO: 2556 - RNA, 20 nt, synthetic construct
  source 1..20: mol_type = other RNA
ctacttcaggaggggagaag

SEQ ID NO: 2557 - RNA, 20 nt, synthetic construct
  source 1..20: mol_type = other RNA
tacttcaggaggggagaagc

SEQ ID NO: 2558 - RNA, 20 nt, synthetic construct
  source 1..20: mol_type = other RNA
cctctccttgcaggtgattc

SEQ ID NO: 2559 - RNA, 20 nt, synthetic construct
  source 1..20: mol_type = other RNA
ctccttgcaggtgattctgg

SEQ ID NO: 2560 - RNA, 20 nt, synthetic construct
  source 1..20: mol_type = other RNA
tgcaggttggtgtaatcagc

SEQ ID NO: 2561 - RNA, 20 nt, synthetic construct
  source 1..20: mol_type = other RNA
gcaggttggtgtaatcagct

SEQ ID NO: 2562 - RNA, 20 nt, synthetic construct
  source 1..20: mol_type = other RNA
ctctcacctctgcaagtatt

SEQ ID NO: 2563 - RNA, 20 nt, synthetic construct
  source 1..20: mol_type = other RNA
tctctcacctctgcaagtat

SEQ ID NO: 2564 - RNA, 20 nt, synthetic construct
  source 1..20: mol_type = other RNA
acccaggggaacaacagaag

SEQ ID NO: 2565 - RNA, 20 nt, synthetic construct
  source 1..20: mol_type = other RNA
ttctgcaggattgcacaaca

SEQ ID NO: 2566 - RNA, 21 nt, synthetic construct
  source 1..21: mol_type = other RNA
tcccttctgaccatcagtcat

SEQ ID NO: 2567 - RNA, 21 nt, synthetic construct
  source 1..21: mol_type = other RNA
actcacccagataatcctccc

SEQ ID NO: 2568 - RNA, 21 nt, synthetic construct
  source 1..21: mol_type = other RNA
ccttacctacgctgaccttga

SEQ ID NO: 2569 - RNA, 21 nt, synthetic construct
  source 1..21: mol_type = other RNA
gtttctcaccttatccccatt

SEQ ID NO: 2570 - RNA, 21 nt, synthetic construct
  source 1..21: mol_type = other RNA
ttctctcacctctgcaagtat

SEQ ID NO: 2571 - RNA, 21 nt, synthetic construct
  source 1..21: mol_type = other RNA
cctcacccacaggtggcaagt

SEQ ID NO: 2572 - RNA, 21 nt, synthetic construct
  source 1..21: mol_type = other RNA
tccctcagatgtctatgtgtt

SEQ ID NO: 2573 - RNA, 21 nt, synthetic construct
  source 1..21: mol_type = other RNA
ctccttctctgccagatgaaa

SEQ ID NO: 2574 - RNA, 21 nt, synthetic construct
  source 1..21: mol_type = other RNA
ctgccagatgaaagccagtct

SEQ ID NO: 2575 - RNA, 22 nt, synthetic construct
  source 1..22: mol_type = other RNA
ccctcaaacctctgcactctgc

SEQ ID NO: 2576 - RNA, 22 nt, synthetic construct
  source 1..22: mol_type = other RNA
tgtgcttacaatgactgagatc

SEQ ID NO: 2577 - RNA, 22 nt, synthetic construct
  source 1..22: mol_type = other RNA
catccttacctacgctgacctt

SEQ ID NO: 2578 - RNA, 22 nt, synthetic construct
  source 1..22: mol_type = other RNA
tctcacctctgcaagtattggg

SEQ ID NO: 2579 - RNA, 22 nt, synthetic construct
  source 1..22: mol_type = other RNA
ctcttcaggtgtgaccaccact

SEQ ID NO: 2580 - RNA, 22 nt, synthetic construct
  source 1..22: mol_type = other RNA
tcaaagcaatccactgtccaag

SEQ ID NO: 2581 - RNA, 22 nt, synthetic construct
  source 1..22: mol_type = other RNA
tctgccagatgaaagccagtct

SEQ ID NO: 2582 - RNA, 22 nt, synthetic construct
  source 1..22: mol_type = other RNA
tgtccccagcgcccttcaaagg

SEQ ID NO: 2583 - RNA, 22 nt, synthetic construct
  source 1..22: mol_type = other RNA
tcctttataggcccatttgtct

SEQ ID NO: 2584 - RNA, 22 nt, synthetic construct
  source 1..22: mol_type = other RNA
gtccagaggaagagctgctccc

SEQ ID NO: 2585 - RNA, 21 nt, synthetic construct
  source 1..21: mol_type = other RNA
tcccttctgaccatcagtcat

SEQ ID NO: 2586 - RNA, 21 nt, synthetic construct
  source 1..21: mol_type = other RNA
actcacccagataatcctccc

SEQ ID NO: 2587 - RNA, 21 nt, synthetic construct
  source 1..21: mol_type = other RNA
ccttacctacgctgaccttga

SEQ ID NO: 2588 - RNA, 21 nt, synthetic construct
  source 1..21: mol_type = other RNA
ttctctcacctctgcaagtat

SEQ ID NO: 2589 - RNA, 21 nt, synthetic construct
  source 1..21: mol_type = other RNA
atgcttctcacctccgttgtc

SEQ ID NO: 2590 - RNA, 21 nt, synthetic construct
  source 1..21: mol_type = other RNA
tgttgttcccctgggtgccag

SEQ ID NO: 2591 - RNA, 21 nt, synthetic construct
  source 1..21: mol_type = other RNA
cttctgaccatcagtcatgag

SEQ ID NO: 2592 - RNA, 21 nt, synthetic construct
  source 1..21: mol_type = other RNA
tcccttctgaccatcagtcat

SEQ ID NO: 2593 - RNA, 21 nt, synthetic construct
  source 1..21: mol_type = other RNA
actcacccagataatcctccc

SEQ ID NO: 2594 - RNA, 21 nt, synthetic construct
  source 1..21: mol_type = other RNA
gacatctgagggataaaaagg

SEQ ID NO: 2595 - RNA, 21 nt, synthetic construct
  source 1..21: mol_type = other RNA
ggctttcatctggcagagaag

SEQ ID NO: 2596 - RNA, 21 nt, synthetic construct
  source 1..21: mol_type = other RNA
ccttacctacgctgaccttga

SEQ ID NO: 2597 - RNA, 21 nt, synthetic construct
  source 1..21: mol_type = other RNA
tgcatccttacctacgctgac

SEQ ID NO: 2598 - RNA, 21 nt, synthetic construct
  source 1..21: mol_type = other RNA
tgtcttactttgttgctggca

SEQ ID NO: 2599 - RNA, 21 nt, synthetic construct
  source 1..21: mol_type = other RNA
gtatgtcttactttgttgctg

SEQ ID NO: 2600 - RNA, 21 nt, synthetic construct
  source 1..21: mol_type = other RNA
gtttctcaccttatccccatt

SEQ ID NO: 2601 - RNA, 21 nt, synthetic construct
  source 1..21: mol_type = other RNA
ttctctcacctctgcaagtat

SEQ ID NO: 2602 - RNA, 21 nt, synthetic construct
  source 1..21: mol_type = other RNA
tacaccaacctgcagaggcag

SEQ ID NO: 2603 - RNA, 20 nt, synthetic construct
  source 1..20: mol_type = other RNA
cacctgaagagaaaggctga

SEQ ID NO: 2604 - RNA, 20 nt, synthetic construct
  source 1..20: mol_type = other RNA
tggattgctttgagaagggg

SEQ ID NO: 2605 - RNA, 20 nt, synthetic construct
  source 1..20: mol_type = other RNA
taccccgctgcagaggtatg

SEQ ID NO: 2606 - RNA, 20 nt, synthetic construct
  source 1..20: mol_type = other RNA
gagtctgggagagtcagaaa

SEQ ID NO: 2607 - RNA, 20 nt, synthetic construct
  source 1..20: mol_type = other RNA
tgggcctataaaggacaagg

SEQ ID NO: 2608 - RNA, 20 nt, synthetic construct
  source 1..20: mol_type = other RNA
aatgggcctataaaggacaa

SEQ ID NO: 2609 - RNA, 20 nt, synthetic construct
  source 1..20: mol_type = other RNA
gcctttctgtaggggaggtg

SEQ ID NO: 2610 - RNA, 20 nt, synthetic construct
  source 1..20: mol_type = other RNA
gtggattgctttgagaaggg

SEQ ID NO: 2611 - RNA, 20 nt, synthetic construct
  source 1..20: mol_type = other RNA
tgcaatcctgcagaagagac

SEQ ID NO: 2612 - RNA, 20 nt, synthetic construct
  source 1..20: mol_type = other RNA
catctgagggataaaaagga

SEQ ID NO: 2613 - RNA, 20 nt, synthetic construct
  source 1..20: mol_type = other RNA
tagacatctgagggataaaa

SEQ ID NO: 2614 - RNA, 20 nt, synthetic construct
  source 1..20: mol_type = other RNA
ccctcctgaagtaggagagt

SEQ ID NO: 2615 - RNA, 20 nt, synthetic construct
  source 1..20: mol_type = other RNA
aaatgggcctataaaggaca

SEQ ID NO: 2616 - RNA, 20 nt, synthetic construct
  source 1..20: mol_type = other RNA
tgcctttctgtaggggaggt

SEQ ID NO: 2617 - RNA, 20 nt, synthetic construct
  source 1..20: mol_type = other RNA
accaacctgcagaggcagtg

SEQ ID NO: 2618 - RNA, 20 nt, synthetic construct
  source 1..20: mol_type = other RNA
cttctcacctccgttgtcac

SEQ ID NO: 2619 - RNA, 20 nt, synthetic construct
  source 1..20: mol_type = other RNA
cttctcacctccgttgtcac

SEQ ID NO: 2620 - RNA, 20 nt, synthetic construct
  source 1..20: mol_type = other RNA
ctgaccatcagtcatgagga

SEQ ID NO: 2621 - RNA, 20 nt, synthetic construct
  source 1..20: mol_type = other RNA
ctgaccatcagtcatgagga

SEQ ID NO: 2622 - RNA, 20 nt, synthetic construct
  source 1..20: mol_type = other RNA
ctccctaccgatcatttggt

SEQ ID NO: 2623 - RNA, 20 nt, synthetic construct
  source 1..20: mol_type = other RNA
ctccctaccgatcatttggt

SEQ ID NO: 2624 - RNA, 20 nt, synthetic construct
  source 1..20: mol_type = other RNA
ttacctacgctgaccttgat

SEQ ID NO: 2625 - RNA, 20 nt, synthetic construct
  source 1..20: mol_type = other RNA
ttacctacgctgaccttgat

SEQ ID NO: 2626 - RNA, 20 nt, synthetic construct
  source 1..20: mol_type = other RNA
atccttacctacgctgacct

SEQ ID NO: 2627 - RNA, 20 nt, synthetic construct
  source 1..20: mol_type = other RNA
atccttacctacgctgacct

SEQ ID NO: 2628 - RNA, 20 nt, synthetic construct
  source 1..20: mol_type = other RNA
tctcaccttatccccattct

SEQ ID NO: 2629 - RNA, 20 nt, synthetic construct
  source 1..20: mol_type = other RNA
tctcaccttatccccattct

SEQ ID NO: 2630 - RNA, 20 nt, synthetic construct
  source 1..20: mol_type = other RNA
gaggactcacttgaatgaaa

SEQ ID NO: 2631 - RNA, 20 nt, synthetic construct
  source 1..20: mol_type = other RNA
gaggactcacttgaatgaaa

SEQ ID NO: 2632 - RNA, 20 nt, synthetic construct
  source 1..20: mol_type = other RNA
tcaaagcaatccactgtcca

SEQ ID NO: 2633 - RNA, 20 nt, synthetic construct
  source 1..20: mol_type = other RNA
tcaaagcaatccactgtcca

SEQ ID NO: 2634 - RNA, 20 nt, synthetic construct
  source 1..20: mol_type = other RNA
ctcccagactccttcatgta

SEQ ID NO: 2635 - RNA, 20 nt, synthetic construct
  source 1..20: mol_type = other RNA
ctcccagactccttcatgta

SEQ ID NO: 2636 - RNA, 20 nt, synthetic construct
  source 1..20: mol_type = other RNA
cccaggggaacaacagaagc

SEQ ID NO: 2637 - RNA, 20 nt, synthetic construct
  source 1..20: mol_type = other RNA
cccaggggaacaacagaagc

SEQ ID NO: 2638 - RNA, 20 nt, synthetic construct
  source 1..20: mol_type = other RNA
acaggtggcaagttatggtg

SEQ ID NO: 2639 - RNA, 20 nt, synthetic construct
  source 1..20: mol_type = other RNA
acaggtggcaagttatggtg

SEQ ID NO: 2640 - RNA, 20 nt, synthetic construct
  source 1..20: mol_type = other RNA
gccagatgaaagccagtctc

SEQ ID NO: 2641 - RNA, 20 nt, synthetic construct
  source 1..20: mol_type = other RNA
gccagatgaaagccagtctc

SEQ ID NO: 2642 - RNA, 20 nt, synthetic construct
  source 1..20: mol_type = other RNA
gtccccagcgcccttcaaag

SEQ ID NO: 2643 - RNA, 20 nt, synthetic construct
  source 1..20: mol_type = other RNA
gtccccagcgcccttcaaag

SEQ ID NO: 2644 - RNA, 20 nt, synthetic construct
  source 1..20: mol_type = other RNA
tacagaaaggcagctgtgag

SEQ ID NO: 2645 - RNA, 20 nt, synthetic construct
  source 1..20: mol_type = other RNA
tacagaaaggcagctgtgag

SEQ ID NO: 2646 - RNA, 20 nt, synthetic construct
  source 1..20: mol_type = other RNA
tcgcttacctccagacaaga

SEQ ID NO: 2647 - RNA, 20 nt, synthetic construct
  source 1..20: mol_type = other RNA
tcgcttacctccagacaaga

SEQ ID NO: 2648 - RNA, 20 nt, synthetic construct
  source 1..20: mol_type = other RNA
tcacctccgttgtcacagat

SEQ ID NO: 2649 - RNA, 20 nt, synthetic construct
  source 1..20: mol_type = other RNA
tcacctccgttgtcacagat

SEQ ID NO: 2650 - RNA, 20 nt, synthetic construct
  source 1..20: mol_type = other RNA
cttacaatgactgagatctt

SEQ ID NO: 2651 - RNA, 20 nt, synthetic construct
  source 1..20: mol_type = other RNA
cttacaatgactgagatctt

SEQ ID NO: 2652 - RNA, 20 nt, synthetic construct
  source 1..20: mol_type = other RNA
acgctctcacctgatagtct

SEQ ID NO: 2653 - RNA, 20 nt, synthetic construct
  source 1..20: mol_type = other RNA
acgctctcacctgatagtct

SEQ ID NO: 2654 - RNA, 20 nt, synthetic construct
  source 1..20: mol_type = other RNA
ctgcaggattgcacaacatg

SEQ ID NO: 2655 - RNA, 20 nt, synthetic construct
  source 1..20: mol_type = other RNA
ctgcaggattgcacaacatg

SEQ ID NO: 2656 - RNA, 20 nt, synthetic construct
  source 1..20: mol_type = other RNA
ataggcccatttgtctcccc

SEQ ID NO: 2657 - RNA, 20 nt, synthetic construct
  source 1..20: mol_type = other RNA
ataggcccatttgtctcccc

SEQ ID NO: 2658 - RNA, 20 nt, synthetic construct
  source 1..20: mol_type = other RNA
ctctgcaggttggtgtaatc

SEQ ID NO: 2659 - RNA, 20 nt, synthetic construct
  source 1..20: mol_type = other RNA
ctctgcaggttggtgtaatc

SEQ ID NO: 2660 - RNA, 20 nt, synthetic construct
  source 1..20: mol_type = other RNA
ctcgcttacctccagacaag

SEQ ID NO: 2661 - RNA, 20 nt, synthetic construct
  source 1..20: mol_type = other RNA
ctcgcttacctccagacaag

SEQ ID NO: 2662 - RNA, 20 nt, synthetic construct
  source 1..20: mol_type = other RNA
caaaggtcaccttggcagga

SEQ ID NO: 2663 - RNA, 20 nt, synthetic construct
  source 1..20: mol_type = other RNA
caaaggtcaccttggcagga

SEQ ID NO: 2664 - RNA, 20 nt, synthetic construct
  source 1..20: mol_type = other RNA
ccttctgaccatcagtcatg

SEQ ID NO: 2665 - RNA, 20 nt, synthetic construct
  source 1..20: mol_type = other RNA
ccttctgaccatcagtcatg

SEQ ID NO: 2666 - RNA, 20 nt, synthetic construct
  source 1..20: mol_type = other RNA
tcacccagataatcctccct

SEQ ID NO: 2667 - RNA, 20 nt, synthetic construct
  source 1..20: mol_type = other RNA
tcacccagataatcctccct

SEQ ID NO: 2668 - RNA, 20 nt, synthetic construct
  source 1..20: mol_type = other RNA
gcttacaatgactgagatct

SEQ ID NO: 2669 - RNA, 20 nt, synthetic construct
  source 1..20: mol_type = other RNA
gcttacaatgactgagatct

SEQ ID NO: 2670 - RNA, 20 nt, synthetic construct
  source 1..20: mol_type = other RNA
cttactttgttgctggcaag

SEQ ID NO: 2671 - RNA, 20 nt, synthetic construct
  source 1..20: mol_type = other RNA
cttactttgttgctggcaag

SEQ ID NO: 2672 - RNA, 20 nt, synthetic construct
  source 1..20: mol_type = other RNA
tctcacctctgcaagtattg

SEQ ID NO: 2673 - RNA, 20 nt, synthetic construct
  source 1..20: mol_type = other RNA
tctcacctctgcaagtattg

SEQ ID NO: 2674 - RNA, 20 nt, synthetic construct
  source 1..20: mol_type = other RNA
cacccacaggtggcaagtta

SEQ ID NO: 2675 - RNA, 20 nt, synthetic construct
  source 1..20: mol_type = other RNA
cacccacaggtggcaagtta

SEQ ID NO: 2676 - RNA, 20 nt, synthetic construct
  source 1..20: mol_type = other RNA
acagaccacaagttgaagtc

SEQ ID NO: 2677 - RNA, 20 nt, synthetic construct
  source 1..20: mol_type = other RNA
acagaccacaagttgaagtc

SEQ ID NO: 2678 - RNA, 20 nt, synthetic construct
  source 1..20: mol_type = other RNA
tctgcaggattgcacaacat

SEQ ID NO: 2679 - RNA, 20 nt, synthetic construct
  source 1..20: mol_type = other RNA
tctgcaggattgcacaacat

SEQ ID NO: 2680 - RNA, 20 nt, synthetic construct
  source 1..20: mol_type = other RNA
gcaggattgcacaacatggg

SEQ ID NO: 2681 - RNA, 20 nt, synthetic construct
  source 1..20: mol_type = other RNA
gcaggattgcacaacatggg

SEQ ID NO: 2682 - RNA, 20 nt, synthetic construct
  source 1..20: mol_type = other RNA
ccctcagatgtctatgtgtt

SEQ ID NO: 2683 - RNA, 20 nt, synthetic construct
  source 1..20: mol_type = other RNA
ccctcagatgtctatgtgtt

SEQ ID NO: 2684 - RNA, 20 nt, synthetic construct
  source 1..20: mol_type = other RNA
cctcagatgtctatgtgttt

SEQ ID NO: 2685 - RNA, 20 nt, synthetic construct
  source 1..20: mol_type = other RNA
cctcagatgtctatgtgttt

SEQ ID NO: 2686 - RNA, 20 nt, synthetic construct
  source 1..20: mol_type = other RNA
ctcagatgtctatgtgtttg

SEQ ID NO: 2687 - RNA, 20 nt, synthetic construct
  source 1..20: mol_type = other RNA
ctcagatgtctatgtgtttg

SEQ ID NO: 2688 - RNA, 20 nt, synthetic construct
  source 1..20: mol_type = other RNA
gtgtccccagcgcccttcaa

SEQ ID NO: 2689 - RNA, 20 nt, synthetic construct
  source 1..20: mol_type = other RNA
gtgtccccagcgcccttcaa

SEQ ID NO: 2690 - RNA, 20 nt, synthetic construct
  source 1..20: mol_type = other RNA
tgtccccagcgcccttcaaa

SEQ ID NO: 2691 - RNA, 20 nt, synthetic construct
  source 1..20: mol_type = other RNA
tgtccccagcgcccttcaaa

SEQ ID NO: 2692 - RNA, 20 nt, synthetic construct
  source 1..20: mol_type = other RNA
ctacttcaggaggggagaag

SEQ ID NO: 2693 - RNA, 20 nt, synthetic construct
  source 1..20: mol_type = other RNA
ctacttcaggaggggagaag

SEQ ID NO: 2694 - RNA, 20 nt, synthetic construct
  source 1..20: mol_type = other RNA
tacttcaggaggggagaagc

SEQ ID NO: 2695 - RNA, 20 nt, synthetic construct
  source 1..20: mol_type = other RNA
tacttcaggaggggagaagc

SEQ ID NO: 2696 - RNA, 20 nt, synthetic construct
  source 1..20: mol_type = other RNA
ctccttgcaggtgattctgg

SEQ ID NO: 2697 - RNA, 20 nt, synthetic construct
  source 1..20: mol_type = other RNA
ctccttgcaggtgattctgg

SEQ ID NO: 2698 - RNA, 20 nt, synthetic construct
  source 1..20: mol_type = other RNA
tgcaggttggtgtaatcagc

SEQ ID NO: 2699 - RNA, 20 nt, synthetic construct
  source 1..20: mol_type = other RNA
tgcaggttggtgtaatcagc

SEQ ID NO: 2700 - RNA, 20 nt, synthetic construct
  source 1..20: mol_type = other RNA
gcaggttggtgtaatcagct

SEQ ID NO: 2701 - RNA, 20 nt, synthetic construct
  source 1..20: mol_type = other RNA
gcaggttggtgtaatcagct

SEQ ID NO: 2702 - RNA, 21 nt, synthetic construct
  source 1..21: mol_type = other RNA
tcccttctgaccatcagtcat

SEQ ID NO: 2703 - RNA, 21 nt, synthetic construct
  source 1..21: mol_type = other RNA
tcccttctgaccatcagtcat

SEQ ID NO: 2704 - RNA, 21 nt, synthetic construct
  source 1..21: mol_type = other RNA
actcacccagataatcctccc

SEQ ID NO: 2705 - RNA, 21 nt, synthetic construct
  source 1..21: mol_type = other RNA
actcacccagataatcctccc

SEQ ID NO: 2706 - RNA, 21 nt, synthetic construct
  source 1..21: mol_type = other RNA
ccttacctacgctgaccttga

SEQ ID NO: 2707 - RNA, 21 nt, synthetic construct
  source 1..21: mol_type = other RNA
ccttacctacgctgaccttga

SEQ ID NO: 2708 - RNA, 21 nt, synthetic construct
  source 1..21: mol_type = other RNA
ttctctcacctctgcaagtat

SEQ ID NO: 2709 - RNA, 21 nt, synthetic construct
  source 1..21: mol_type = other RNA
ttctctcacctctgcaagtat

SEQ ID NO: 2710 - RNA, 21 nt, synthetic construct
  source 1..21: mol_type = other RNA
tccctcagatgtctatgtgtt

SEQ ID NO: 2711 - RNA, 21 nt, synthetic construct
  source 1..21: mol_type = other RNA
tccctcagatgtctatgtgtt

SEQ ID NO: 2712 - RNA, 21 nt, synthetic construct
  source 1..21: mol_type = other RNA
ctgccagatgaaagccagtct

SEQ ID NO: 2713 - RNA, 21 nt, synthetic construct
  source 1..21: mol_type = other RNA
ctgccagatgaaagccagtct

SEQ ID NO: 2714 - RNA, 21 nt, synthetic construct
  source 1..21: mol_type = other RNA
atgcttctcacctccgttgtc

SEQ ID NO: 2715 - RNA, 21 nt, synthetic construct
  source 1..21: mol_type = other RNA
atgcttctcacctccgttgtc

SEQ ID NO: 2716 - RNA, 21 nt, synthetic construct
  source 1..21: mol_type = other RNA
aggaggattccaccttctcaa

SEQ ID NO: 2717 - RNA, 21 nt, synthetic construct
  source 1..21: mol_type = other RNA
aggaggattccaccttctcaa

SEQ ID NO: 2718 - RNA, 21 nt, synthetic construct
  source 1..21: mol_type = other RNA
ccctaacctctgaccttcata

SEQ ID NO: 2719 - RNA, 21 nt, synthetic construct
  source 1..21: mol_type = other RNA
ccctaacctctgaccttcata

SEQ ID NO: 2720 - RNA, 21 nt, synthetic construct
  source 1..21: mol_type = other RNA
cttctgaccatcagtcatgag

SEQ ID NO: 2721 - RNA, 21 nt, synthetic construct
  source 1..21: mol_type = other RNA
cttctgaccatcagtcatgag

SEQ ID NO: 2722 - RNA, 21 nt, synthetic construct
  source 1..21: mol_type = other RNA
cttgtatctccctaccgatca

SEQ ID NO: 2723 - RNA, 21 nt, synthetic construct
  source 1..21: mol_type = other RNA
cttgtatctccctaccgatca

SEQ ID NO: 2724 - RNA, 21 nt, synthetic construct
  source 1..21: mol_type = other RNA
ggattctgtgcttacaatgac

SEQ ID NO: 2725 - RNA, 21 nt, synthetic construct
  source 1..21: mol_type = other RNA
ggattctgtgcttacaatgac

SEQ ID NO: 2726 - RNA, 21 nt, synthetic construct
  source 1..21: mol_type = other RNA
tgcatccttacctacgctgac

SEQ ID NO: 2727 - RNA, 21 nt, synthetic construct
  source 1..21: mol_type = other RNA
tgcatccttacctacgctgac

SEQ ID NO: 2728 - RNA, 21 nt, synthetic construct
  source 1..21: mol_type = other RNA
tgtcttactttgttgctggca

SEQ ID NO: 2729 - RNA, 21 nt, synthetic construct
  source 1..21: mol_type = other RNA
tgtcttactttgttgctggca

SEQ ID NO: 2730 - RNA, 21 nt, synthetic construct
  source 1..21: mol_type = other RNA
gtatgtcttactttgttgctg

SEQ ID NO: 2731 - RNA, 21 nt, synthetic construct
  source 1..21: mol_type = other RNA
gtatgtcttactttgttgctg

SEQ ID NO: 2732 - RNA, 21 nt, synthetic construct
  source 1..21: mol_type = other RNA
cttcaggtgtgaccaccactc

SEQ ID NO: 2733 - RNA, 21 nt, synthetic construct
  source 1..21: mol_type = other RNA
cttcaggtgtgaccaccactc

SEQ ID NO: 2734 - RNA, 21 nt, synthetic construct
  source 1..21: mol_type = other RNA
ccctctccacagaccacaagt

SEQ ID NO: 2735 - RNA, 21 nt, synthetic construct
  source 1..21: mol_type = other RNA
ccctctccacagaccacaagt

SEQ ID NO: 2736 - RNA, 21 nt, synthetic construct
  source 1..21: mol_type = other RNA
ctacagaaaggcagctgtgag

SEQ ID NO: 2737 - RNA, 21 nt, synthetic construct
  source 1..21: mol_type = other RNA
ctacagaaaggcagctgtgag

SEQ ID NO: 2738 - RNA, 21 nt, synthetic construct
  source 1..21: mol_type = other RNA
tgttgttcccctgggtgccag

SEQ ID NO: 2739 - RNA, 21 nt, synthetic construct
  source 1..21: mol_type = other RNA
tgttgttcccctgggtgccag

SEQ ID NO: 2740 - RNA, 21 nt, synthetic construct
  source 1..21: mol_type = other RNA
gacatctgagggataaaaagg

SEQ ID NO: 2741 - RNA, 21 nt, synthetic construct
  source 1..21: mol_type = other RNA
gacatctgagggataaaaagg

SEQ ID NO: 2742 - RNA, 21 nt, synthetic construct
  source 1..21: mol_type = other RNA
ggctttcatctggcagagaag

SEQ ID NO: 2743 - RNA, 21 nt, synthetic construct
  source 1..21: mol_type = other RNA
ggctttcatctggcagagaag

SEQ ID NO: 2744 - RNA, 21 nt, synthetic construct
  source 1..21: mol_type = other RNA
tacaccaacctgcagaggcag

SEQ ID NO: 2745 - RNA, 21 nt, synthetic construct
  source 1..21: mol_type = other RNA
tacaccaacctgcagaggcag

SEQ ID NO: 2746 - RNA, 21 nt, synthetic construct
  source 1..21: mol_type = other RNA
cttacctccagacaagaggcc

SEQ ID NO: 2747 - RNA, 21 nt, synthetic construct
  source 1..21: mol_type = other RNA
cttacctccagacaagaggcc

SEQ ID NO: 2748 - RNA, 21 nt, synthetic construct
  source 1..21: mol_type = other RNA
tggtcacacctgaagagaaag

SEQ ID NO: 2749 - RNA, 21 nt, synthetic construct
  source 1..21: mol_type = other RNA
tggtcacacctgaagagaaag

SEQ ID NO: 2750 - RNA, 21 nt, synthetic construct
  source 1..21: mol_type = other RNA
ggattgctttgagaagggggg

SEQ ID NO: 2751 - RNA, 21 nt, synthetic construct
  source 1..21: mol_type = other RNA
ggattgctttgagaagggggg

SEQ ID NO: 2752 - RNA, 21 nt, synthetic construct
  source 1..21: mol_type = other RNA
cgctgcagaggtatgagacat

SEQ ID NO: 2753 - RNA, 21 nt, synthetic construct
  source 1..21: mol_type = other RNA
cgctgcagaggtatgagacat

SEQ ID NO: 2754 - RNA, 21 nt, synthetic construct
  source 1..21: mol_type = other RNA
ggagtctgggagagtcagaaa

SEQ ID NO: 2755 - RNA, 21 nt, synthetic construct
  source 1..21: mol_type = other RNA
ggagtctgggagagtcagaaa

SEQ ID NO: 2756 - RNA, 21 nt, synthetic construct
  source 1..21: mol_type = other RNA
atgaaggagtctgggagagtc

SEQ ID NO: 2757 - RNA, 21 nt, synthetic construct
  source 1..21: mol_type = other RNA
atgaaggagtctgggagagtc

SEQ ID NO: 2758 - RNA, 21 nt, synthetic construct
  source 1..21: mol_type = other RNA
tttgaagggcgctggggacac

SEQ ID NO: 2759 - RNA, 21 nt, synthetic construct
  source 1..21: mol_type = other RNA
tttgaagggcgctggggacac

SEQ ID NO: 2760 - RNA, 21 nt, synthetic construct
  source 1..21: mol_type = other RNA
ctcccctcctgaagtaggaga

SEQ ID NO: 2761 - RNA, 21 nt, synthetic construct
  source 1..21: mol_type = other RNA
ctcccctcctgaagtaggaga

SEQ ID NO: 2762 - RNA, 21 nt, synthetic construct
  source 1..21: mol_type = other RNA
cttactttgttgctggcaagt

SEQ ID NO: 2763 - RNA, 21 nt, synthetic construct
  source 1..21: mol_type = other RNA
cttactttgttgctggcaagt

SEQ ID NO: 2764 - RNA, 20 nt, synthetic construct
  source 1..20: mol_type = other RNA
actccatcggccattcactt

SEQ ID NO: 2765 - RNA, 20 nt, synthetic construct
  source 1..20: mol_type = other RNA
acccaaattttggggtatgt

SEQ ID NO: 2766 - RNA, 20 nt, synthetic construct
  source 1..20: mol_type = other RNA
cgtgacccagtctgcattac

SEQ ID NO: 2767 - RNA, 20 nt, synthetic construct
  source 1..20: mol_type = other RNA
gaccaaaagactgtcaggaa

SEQ ID NO: 2768 - RNA, 20 nt, synthetic construct
  source 1..20: mol_type = other RNA
ggccgatggagtgggcagac

SEQ ID NO: 2769 - RNA, 20 nt, synthetic construct
  source 1..20: mol_type = other RNA
acccctcaagaggtggccga

SEQ ID NO: 2770 - RNA, 20 nt, synthetic construct
  source 1..20: mol_type = other RNA
aggccctccaggcagtgtac

SEQ ID NO: 2771 - RNA, 20 nt, synthetic construct
  source 1..20: mol_type = other RNA
tggccagactatcaggtgag

SEQ ID NO: 2772 - RNA, 20 nt, synthetic construct
  source 1..20: mol_type = other RNA
caacaaagtaagacatactt

SEQ ID NO: 2773 - RNA, 20 nt, synthetic construct
  source 1..20: mol_type = other RNA
caaaagcaggtacctgctca

SEQ ID NO: 2774 - RNA, 20 nt, synthetic construct
  source 1..20: mol_type = other RNA
cctctttcaagtgctgccct

SEQ ID NO: 2775 - RNA, 21 nt, synthetic construct
  source 1..21: mol_type = other RNA
gagaaactccaagatgaggat

SEQ ID NO: 2776 - RNA, 21 nt, synthetic construct
  source 1..21: mol_type = other RNA
ctgccatggttgcttgtggta

SEQ ID NO: 2777 - RNA, 21 nt, synthetic construct
  source 1..21: mol_type = other RNA
ttctccaagagggccaggcac

SEQ ID NO: 2778 - RNA, 21 nt, synthetic construct
  source 1..21: mol_type = other RNA
accctgtgcagacacgtacct

SEQ ID NO: 2779 - RNA, 21 nt, synthetic construct
  source 1..21: mol_type = other RNA
accaaaagactgtcaggaagg

SEQ ID NO: 2780 - RNA, 21 nt, synthetic construct
  source 1..21: mol_type = other RNA
acctgccaagtgaatggccga

SEQ ID NO: 2781 - RNA, 21 nt, synthetic construct
  source 1..21: mol_type = other RNA
agacaatgagcaacatgtgtt

SEQ ID NO: 2782 - RNA, 21 nt, synthetic construct
  source 1..21: mol_type = other RNA
gagcaacatgtgttcaaagtc

SEQ ID NO: 2783 - RNA, 21 nt, synthetic construct
  source 1..21: mol_type = other RNA
ccacaagcaaccatggcaggc

SEQ ID NO: 2784 - RNA, 21 nt, synthetic construct
  source 1..21: mol_type = other RNA
caaaaaccagaagcggcaaaa

SEQ ID NO: 2785 - RNA, 21 nt, synthetic construct
  source 1..21: mol_type = other RNA
gagaaactccaagatgaggat

SEQ ID NO: 2786 - RNA, 20 nt, synthetic construct
  source 1..20: mol_type = other RNA
agggtgctccaggaccccgt

SEQ ID NO: 2787 - RNA, 20 nt, synthetic construct
  source 1..20: mol_type = other RNA
gggccagtattccccgttct

SEQ ID NO: 2788 - RNA, 20 nt, synthetic construct
  source 1..20: mol_type = other RNA
cgctccaagagccaccttcc

SEQ ID NO: 2789 - RNA, 20 nt, synthetic construct
  source 1..20: mol_type = other RNA
gcggttccagccttcaggag

SEQ ID NO: 2790 - RNA, 20 nt, synthetic construct
  source 1..20: mol_type = other RNA
gttcccaaaccatgccacag

SEQ ID NO: 2791 - RNA, 20 nt, synthetic construct
  source 1..20: mol_type = other RNA
gtgttcccaaaccatgccac

SEQ ID NO: 2792 - RNA, 20 nt, synthetic construct
  source 1..20: mol_type = other RNA
cagccagggcagcacttgaa

SEQ ID NO: 2793 - RNA, 20 nt, synthetic construct
  source 1..20: mol_type = other RNA
ccttcagccagggcagcact

SEQ ID NO: 2794 - RNA, 20 nt, synthetic construct
  source 1..20: mol_type = other RNA
ccccagggatcctgctctct

SEQ ID NO: 2795 - RNA, 20 nt, synthetic construct
  source 1..20: mol_type = other RNA
tcaagaccaaaagactgtca

SEQ ID NO: 2796 - RNA, 20 nt, synthetic construct
  source 1..20: mol_type = other RNA
gcacctgccaagtgaatggc

SEQ ID NO: 2797 - RNA, 20 nt, synthetic construct
  source 1..20: mol_type = other RNA
ctgccaagtgaatggccgat

SEQ ID NO: 2798 - RNA, 20 nt, synthetic construct
  source 1..20: mol_type = other RNA
gaatggccgatggagtgggc

SEQ ID NO: 2799 - RNA, 20 nt, synthetic construct
  source 1..20: mol_type = other RNA
agtgggcagacagcgatctg

SEQ ID NO: 2800 - RNA, 20 nt, synthetic construct
  source 1..20: mol_type = other RNA
ggcagccagtaccgccttga

SEQ ID NO: 2801 - RNA, 20 nt, synthetic construct
  source 1..20: mol_type = other RNA
tcccagcggcgaacgtgtca

SEQ ID NO: 2802 - RNA, 20 nt, synthetic construct
  source 1..20: mol_type = other RNA
gtgtcaggaaggtggctctt

SEQ ID NO: 2803 - RNA, 20 nt, synthetic construct
  source 1..20: mol_type = other RNA
aggggaacaacagaagcgga

SEQ ID NO: 2804 - RNA, 20 nt, synthetic construct
  source 1..20: mol_type = other RNA
cctccaggcagtgtacagca

SEQ ID NO: 2805 - RNA, 20 nt, synthetic construct
  source 1..20: mol_type = other RNA
ttctaccaaatgatcggtag

SEQ ID NO: 2806 - RNA, 20 nt, synthetic construct
  source 1..20: mol_type = other RNA
ctaccaaatgatcggtaggg

SEQ ID NO: 2807 - RNA, 20 nt, synthetic construct
  source 1..20: mol_type = other RNA
caagcaaccatggcaggcca

SEQ ID NO: 2808 - RNA, 20 nt, synthetic construct
  source 1..20: mol_type = other RNA
tatggccagactatcaggtg

SEQ ID NO: 2809 - RNA, 20 nt, synthetic construct
  source 1..20: mol_type = other RNA
cacttgccagcaacaaagta

SEQ ID NO: 2810 - RNA, 20 nt, synthetic construct
  source 1..20: mol_type = other RNA
gctcaatatgccccaggcta

SEQ ID NO: 2811 - RNA, 20 nt, synthetic construct
  source 1..20: mol_type = other RNA
ctttcaagtgctgccctggc

SEQ ID NO: 2812 - RNA, 20 nt, synthetic construct
  source 1..20: mol_type = other RNA
cactccatcggccattcact

SEQ ID NO: 2813 - RNA, 20 nt, synthetic construct
  source 1..20: mol_type = other RNA
gacccaaattttggggtatg

SEQ ID NO: 2814 - RNA, 20 nt, synthetic construct
  source 1..20: mol_type = other RNA
tgcggttccagccttcagga

SEQ ID NO: 2815 - RNA, 20 nt, synthetic construct
  source 1..20: mol_type = other RNA
gtgcggttccagccttcagg

SEQ ID NO: 2816 - RNA, 20 nt, synthetic construct
  source 1..20: mol_type = other RNA
tggcctgccatggttgcttg

SEQ ID NO: 2817 - RNA, 20 nt, synthetic construct
  source 1..20: mol_type = other RNA
ctccttccgacttctccaag

SEQ ID NO: 2818 - RNA, 20 nt, synthetic construct
  source 1..20: mol_type = other RNA
tccttccgacttctccaaga

SEQ ID NO: 2819 - RNA, 20 nt, synthetic construct
  source 1..20: mol_type = other RNA
tctccaagagggccaggcac

SEQ ID NO: 2820 - RNA, 20 nt, synthetic construct
  source 1..20: mol_type = other RNA
ctcaagaccaaaagactgtc

SEQ ID NO: 2821 - RNA, 20 nt, synthetic construct
  source 1..20: mol_type = other RNA
agaccaaaagactgtcagga

SEQ ID NO: 2822 - RNA, 20 nt, synthetic construct
  source 1..20: mol_type = other RNA
cctgccaagtgaatggccga

SEQ ID NO: 2823 - RNA, 20 nt, synthetic construct
  source 1..20: mol_type = other RNA
ctcccagcggcgaacgtgtc

SEQ ID NO: 2824 - RNA, 20 nt, synthetic construct
  source 1..20: mol_type = other RNA
cagcggcgaacgtgtcagga

SEQ ID NO: 2825 - RNA, 20 nt, synthetic construct
  source 1..20: mol_type = other RNA
cggcgaacgtgtcaggaagg

SEQ ID NO: 2826 - RNA, 20 nt, synthetic construct
  source 1..20: mol_type = other RNA
cgtgtcaggaaggtggctct

SEQ ID NO: 2827 - RNA, 20 nt, synthetic construct
  source 1..20: mol_type = other RNA
ttttctaccaaatgatcggt

SEQ ID NO: 2828 - RNA, 20 nt, synthetic construct
  source 1..20: mol_type = other RNA
tttctaccaaatgatcggta

SEQ ID NO: 2829 - RNA, 20 nt, synthetic construct
  source 1..20: mol_type = other RNA
gcaacaaagtaagacatact

SEQ ID NO: 2830 - RNA, 20 nt, synthetic construct
  source 1..20: mol_type = other RNA
acctctttcaagtgctgccc

SEQ ID NO: 2831 - RNA, 20 nt, synthetic construct
  source 1..20: mol_type = other RNA
gaaactccaagatgaggatt

SEQ ID NO: 2832 - RNA, 20 nt, synthetic construct
  source 1..20: mol_type = other RNA
aaactccaagatgaggattt

SEQ ID NO: 2833 - RNA, 21 nt, synthetic construct
  source 1..21: mol_type = other RNA
ttctccaagagggccaggcac

SEQ ID NO: 2834 - RNA, 21 nt, synthetic construct
  source 1..21: mol_type = other RNA
ttctccaagagggccaggcac

SEQ ID NO: 2835 - RNA, 21 nt, synthetic construct
  source 1..21: mol_type = other RNA
accaaaagactgtcaggaagg

SEQ ID NO: 2836 - RNA, 21 nt, synthetic construct
  source 1..21: mol_type = other RNA
accaaaagactgtcaggaagg

SEQ ID NO: 2837 - RNA, 21 nt, synthetic construct
  source 1..21: mol_type = other RNA
acctgccaagtgaatggccga

SEQ ID NO: 2838 - RNA, 21 nt, synthetic construct
  source 1..21: mol_type = other RNA
acctgccaagtgaatggccga

SEQ ID NO: 2839 - RNA, 21 nt, synthetic construct
  source 1..21: mol_type = other RNA
gagcaacatgtgttcaaagtc

SEQ ID NO: 2840 - RNA, 21 nt, synthetic construct
  source 1..21: mol_type = other RNA
gagcaacatgtgttcaaagtc

SEQ ID NO: 2841 - RNA, 21 nt, synthetic construct
  source 1..21: mol_type = other RNA
gctccaggaccccgtagatct

SEQ ID NO: 2842 - RNA, 21 nt, synthetic construct
  source 1..21: mol_type = other RNA
gctccaggaccccgtagatct

SEQ ID NO: 2843 - RNA, 21 nt, synthetic construct
  source 1..21: mol_type = other RNA
ttcagggtgctccaggacccc

SEQ ID NO: 2844 - RNA, 21 nt, synthetic construct
  source 1..21: mol_type = other RNA
ttcagggtgctccaggacccc

SEQ ID NO: 2845 - RNA, 21 nt, synthetic construct
  source 1..21: mol_type = other RNA
ggggccagtattccccgttct

SEQ ID NO: 2846 - RNA, 21 nt, synthetic construct
  source 1..21: mol_type = other RNA
ggggccagtattccccgttct

SEQ ID NO: 2847 - RNA, 21 nt, synthetic construct
  source 1..21: mol_type = other RNA
actccatcggccattcacttg

SEQ ID NO: 2848 - RNA, 21 nt, synthetic construct
  source 1..21: mol_type = other RNA
actccatcggccattcacttg

SEQ ID NO: 2849 - RNA, 21 nt, synthetic construct
  source 1..21: mol_type = other RNA
tggcctgccatggttgcttgt

SEQ ID NO: 2850 - RNA, 21 nt, synthetic construct
  source 1..21: mol_type = other RNA
tggcctgccatggttgcttgt

SEQ ID NO: 2851 - RNA, 21 nt, synthetic construct
  source 1..21: mol_type = other RNA
tcttggcctgccatggttgct

SEQ ID NO: 2852 - RNA, 21 nt, synthetic construct
  source 1..21: mol_type = other RNA
tcttggcctgccatggttgct

SEQ ID NO: 2853 - RNA, 21 nt, synthetic construct
  source 1..21: mol_type = other RNA
tcagccagggcagcacttgaa

SEQ ID NO: 2854 - RNA, 21 nt, synthetic construct
  source 1..21: mol_type = other RNA
tcagccagggcagcacttgaa

SEQ ID NO: 2855 - RNA, 21 nt, synthetic construct
  source 1..21: mol_type = other RNA
atcgcacctgccaagtgaatg

SEQ ID NO: 2856 - RNA, 21 nt, synthetic construct
  source 1..21: mol_type = other RNA
atcgcacctgccaagtgaatg

SEQ ID NO: 2857 - RNA, 21 nt, synthetic construct
  source 1..21: mol_type = other RNA
tggccgatggagtgggcagac

SEQ ID NO: 2858 - RNA, 21 nt, synthetic construct
  source 1..21: mol_type = other RNA
tggccgatggagtgggcagac

SEQ ID NO: 2859 - RNA, 21 nt, synthetic construct
  source 1..21: mol_type = other RNA
tcccagcggcgaacgtgtcag

SEQ ID NO: 2860 - RNA, 21 nt, synthetic construct
  source 1..21: mol_type = other RNA
tcccagcggcgaacgtgtcag

SEQ ID NO: 2861 - RNA, 21 nt, synthetic construct
  source 1..21: mol_type = other RNA
cccaggggaacaacagaagcg

SEQ ID NO: 2862 - RNA, 21 nt, synthetic construct
  source 1..21: mol_type = other RNA
cccaggggaacaacagaagcg

SEQ ID NO: 2863 - RNA, 21 nt, synthetic construct
  source 1..21: mol_type = other RNA
gtcacgaagcagctcaatgaa

SEQ ID NO: 2864 - RNA, 21 nt, synthetic construct
  source 1..21: mol_type = other RNA
gtcacgaagcagctcaatgaa

SEQ ID NO: 2865 - RNA, 21 nt, synthetic construct
  source 1..21: mol_type = other RNA
ggccctccaggcagtgtacag

SEQ ID NO: 2866 - RNA, 21 nt, synthetic construct
  source 1..21: mol_type = other RNA
ggccctccaggcagtgtacag

SEQ ID NO: 2867 - RNA, 21 nt, synthetic construct
  source 1..21: mol_type = other RNA
tttctaccaaatgatcggtag

SEQ ID NO: 2868 - RNA, 21 nt, synthetic construct
  source 1..21: mol_type = other RNA
tttctaccaaatgatcggtag

SEQ ID NO: 2869 - RNA, 21 nt, synthetic construct
  source 1..21: mol_type = other RNA
gcaaccatggcaggccaagat

SEQ ID NO: 2870 - RNA, 21 nt, synthetic construct
  source 1..21: mol_type = other RNA
gcaaccatggcaggccaagat

SEQ ID NO: 2871 - DNA, 23 bp, synthetic construct
  source 1..23: mol_type = other DNA
aaaaggctgggggctggtgggga

SEQ ID NO: 2872 - DNA, 23 bp, synthetic construct
  source 1..23: mol_type = other DNA
aaaaggctgggggctggtgggga

SEQ ID NO: 2873 - DNA, 23 bp, synthetic construct
  source 1..23: mol_type = other DNA
aaaaggctgggggctggtgggga

SEQ ID NO: 2874 - DNA, 22 bp, synthetic construct
  source 1..22: mol_type = other DNA
aaaaggctgggggctggtgggg

SEQ ID NO: 2875 - DNA, 22 bp, synthetic construct
  source 1..22: mol_type = other DNA
aaaaggctgggggctggtgggg

SEQ ID NO: 2876 - DNA, 23 bp, synthetic construct
  source 1..23: mol_type = other DNA
aaaaggctgggggctggtgggga

SEQ ID NO: 2877 - DNA, 23 bp, synthetic construct
  source 1..23: mol_type = other DNA
aaaaggctgggggctggtgggga

SEQ ID NO: 2878 - DNA, 23 bp, synthetic construct
  source 1..23: mol_type = other DNA
aaaaggctgggggctggtgggga

SEQ ID NO: 2879 - DNA, 23 bp, synthetic construct
  source 1..23: mol_type = other DNA
aaaggctgggggctggtggggag

SEQ ID NO: 2880 - DNA, 23 bp, synthetic construct
  source 1..23: mol_type = other DNA
aaaggctgggggctggtggggag

SEQ ID NO: 2881 - DNA, 23 bp, synthetic construct
  source 1..23: mol_type = other DNA
aaaggctgggggctggtggggag

SEQ ID NO: 2882 - DNA, 24 bp, synthetic construct
  source 1..24: mol_type = other DNA
aaaggctgggggctggtggggagc

SEQ ID NO: 2883 - DNA, 23 bp, synthetic construct
  source 1..23: mol_type = other DNA
aaggctgggggctggtggggagc

SEQ ID NO: 2884 - DNA, 23 bp, synthetic construct
  source 1..23: mol_type = other DNA
aaggctgggggctggtggggagc

SEQ ID NO: 2885 - DNA, 23 bp, synthetic construct
  source 1..23: mol_type = other DNA
aaggctgggggctggtggggagc

SEQ ID NO: 2886 - DNA, 22 bp, synthetic construct
  source 1..22: mol_type = other DNA
aaggctgggggctggtggggag

SEQ ID NO: 2887 - DNA, 22 bp, synthetic construct
  source 1..22: mol_type = other DNA
aaggctgggggctggtggggag

SEQ ID NO: 2888 - DNA, 23 bp, synthetic construct
  source 1..23: mol_type = other DNA
aaggctgggggctggtggggagc

SEQ ID NO: 2889 - DNA, 23 bp, synthetic construct
  source 1..23: mol_type = other DNA
aaggctgggggctggtggggagc

SEQ ID NO: 2890 - DNA, 23 bp, synthetic construct
  source 1..23: mol_type = other DNA
aaggctgggggctggtggggagc

SEQ ID NO: 2891 - DNA, 24 bp, synthetic construct
  source 1..24: mol_type = other DNA
aaggctgggggctggtggggagca

SEQ ID NO: 2892 - DNA, 24 bp, synthetic construct
  source 1..24: mol_type = other DNA
aaggctgggggctggtggggagca

SEQ ID NO: 2893 - DNA, 23 bp, synthetic construct
  source 1..23: mol_type = other DNA
aatctgtgttctggcacctgcgg

SEQ ID NO: 2894 - DNA, 23 bp, synthetic construct
  source 1..23: mol_type = other DNA
aatctgtgttctggcacctgcgg

SEQ ID NO: 2895 - DNA, 23 bp, synthetic construct
  source 1..23: mol_type = other DNA
aatctgtgttctggcacctgcgg

SEQ ID NO: 2896 - DNA, 23 bp, synthetic construct
  source 1..23: mol_type = other DNA
aatctgtgttctggcacctgcgg

SEQ ID NO: 2897 - DNA, 22 bp, synthetic construct
  source 1..22: mol_type = other DNA
aatctgtgttctggcacctgcg

SEQ ID NO: 2898 - DNA, 22 bp, synthetic construct
  source 1..22: mol_type = other DNA
aatctgtgttctggcacctgcg

SEQ ID NO: 2899 - DNA, 23 bp, synthetic construct
  source 1..23: mol_type = other DNA
aatctgtgttctggcacctgcgg

SEQ ID NO: 2900 - DNA, 23 bp, synthetic construct
  source 1..23: mol_type = other DNA
aatctgtgttctggcacctgcgg

SEQ ID NO: 2901 - DNA, 23 bp, synthetic construct
  source 1..23: mol_type = other DNA
aatctgtgttctggcacctgcgg

SEQ ID NO: 2902 - DNA, 24 bp, synthetic construct
  source 1..24: mol_type = other DNA
aatctgtgttctggcacctgcggc

SEQ ID NO: 2903 - DNA, 23 bp, synthetic construct
  source 1..23: mol_type = other DNA
acaatctgtgttctggcacctgc

SEQ ID NO: 2904 - DNA, 23 bp, synthetic construct
  source 1..23: mol_type = other DNA
acaatctgtgttctggcacctgc

SEQ ID NO: 2905 - DNA, 23 bp, synthetic construct
  source 1..23: mol_type = other DNA
acaatctgtgttctggcacctgc

SEQ ID NO: 2906 - DNA, 22 bp, synthetic construct
  source 1..22: mol_type = other DNA
acaatctgtgttctggcacctg

SEQ ID NO: 2907 - DNA, 22 bp, synthetic construct
  source 1..22: mol_type = other DNA
acaatctgtgttctggcacctg

SEQ ID NO: 2908 - DNA, 23 bp, synthetic construct
  source 1..23: mol_type = other DNA
acaatctgtgttctggcacctgc

SEQ ID NO: 2909 - DNA, 23 bp, synthetic construct
  source 1..23: mol_type = other DNA
acaatctgtgttctggcacctgc

SEQ ID NO: 2910 - DNA, 23 bp, synthetic construct
  source 1..23: mol_type = other DNA
acaatctgtgttctggcacctgc

SEQ ID NO: 2911 - DNA, 23 bp, synthetic construct
  source 1..23: mol_type = other DNA
acacagattgtataaaaggctgg

SEQ ID NO: 2912 - DNA, 23 bp, synthetic construct
  source 1..23: mol_type = other DNA
acacagattgtataaaaggctgg

SEQ ID NO: 2913 - DNA, 23 bp, synthetic construct
  source 1..23: mol_type = other DNA
acacagattgtataaaaggctgg

SEQ ID NO: 2914 - DNA, 23 bp, synthetic construct
  source 1..23: mol_type = other DNA
acacagattgtataaaaggctgg

SEQ ID NO: 2915 - DNA, 23 bp, synthetic construct
  source 1..23: mol_type = other DNA
acacagattgtataaaaggctgg

SEQ ID NO: 2916 - DNA, 22 bp, synthetic construct
  source 1..22: mol_type = other DNA
acacagattgtataaaaggctg

SEQ ID NO: 2917 - DNA, 22 bp, synthetic construct
  source 1..22: mol_type = other DNA
acacagattgtataaaaggctg

SEQ ID NO: 2918 - DNA, 23 bp, synthetic construct
  source 1..23: mol_type = other DNA
acacagattgtataaaaggctgg

SEQ ID NO: 2919 - DNA, 23 bp, synthetic construct
  source 1..23: mol_type = other DNA
acacagattgtataaaaggctgg

SEQ ID NO: 2920 - DNA, 23 bp, synthetic construct
  source 1..23: mol_type = other DNA
acacagattgtataaaaggctgg

SEQ ID NO: 2921 - DNA, 23 bp, synthetic construct
  source 1..23: mol_type = other DNA
acagattgtataaaaggctgggg

SEQ ID NO: 2922 - DNA, 23 bp, synthetic construct
  source 1..23: mol_type = other DNA
acagattgtataaaaggctgggg

SEQ ID NO: 2923 - DNA, 23 bp, synthetic construct
  source 1..23: mol_type = other DNA
acagattgtataaaaggctgggg

SEQ ID NO: 2924 - DNA, 23 bp, synthetic construct
  source 1..23: mol_type = other DNA
acagattgtataaaaggctgggg

SEQ ID NO: 2925 - DNA, 23 bp, synthetic construct
  source 1..23: mol_type = other DNA
acagattgtataaaaggctgggg

SEQ ID NO: 2926 - DNA, 22 bp, synthetic construct
  source 1..22: mol_type = other DNA
acagattgtataaaaggctggg

SEQ ID NO: 2927 - DNA, 22 bp, synthetic construct
  source 1..22: mol_type = other DNA
acagattgtataaaaggctggg

SEQ ID NO: 2928 - DNA, 23 bp, synthetic construct
  source 1..23: mol_type = other DNA
acagattgtataaaaggctgggg

SEQ ID NO: 2929 - DNA, 23 bp, synthetic construct
  source 1..23: mol_type = other DNA
acagattgtataaaaggctgggg

SEQ ID NO: 2930 - DNA, 23 bp, synthetic construct
  source 1..23: mol_type = other DNA
acagattgtataaaaggctgggg

SEQ ID NO: 2931 - DNA, 23 bp, synthetic construct
  source 1..23: mol_type = other DNA
agaacacagattgtataaaaggc

SEQ ID NO: 2932 - DNA, 23 bp, synthetic construct
  source 1..23: mol_type = other DNA
agaacacagattgtataaaaggc

SEQ ID NO: 2933 - DNA, 22 bp, synthetic construct
  source 1..22: mol_type = other DNA
agaacacagattgtataaaagg

SEQ ID NO: 2934 - DNA, 22 bp, synthetic construct
  source 1..22: mol_type = other DNA
agaacacagattgtataaaagg

SEQ ID NO: 2935 - DNA, 23 bp, synthetic construct
  source 1..23: mol_type = other DNA
agaacacagattgtataaaaggc

SEQ ID NO: 2936 - DNA, 23 bp, synthetic construct
  source 1..23: mol_type = other DNA
agaacacagattgtataaaaggc

SEQ ID NO: 2937 - DNA, 23 bp, synthetic construct
  source 1..23: mol_type = other DNA
agaacacagattgtataaaaggc

SEQ ID NO: 2938 - DNA, 24 bp, synthetic construct
  source 1..24: mol_type = other DNA
agaacacagattgtataaaaggct

SEQ ID NO: 2939 - DNA, 24 bp, synthetic construct
  source 1..24: mol_type = other DNA
agaacacagattgtataaaaggct

SEQ ID NO: 2940 - DNA, 23 bp, synthetic construct
  source 1..23: mol_type = other DNA
agattgtataaaaggctgggggc

SEQ ID NO: 2941 - DNA, 23 bp, synthetic construct
  source 1..23: mol_type = other DNA
agattgtataaaaggctgggggc

SEQ ID NO: 2942 - DNA, 23 bp, synthetic construct
  source 1..23: mol_type = other DNA
agattgtataaaaggctgggggc

SEQ ID NO: 2943 - DNA, 22 bp, synthetic construct
  source 1..22: mol_type = other DNA
agattgtataaaaggctggggg

SEQ ID NO: 2944 - DNA, 22 bp, synthetic construct
  source 1..22: mol_type = other DNA
agattgtataaaaggctggggg

SEQ ID NO: 2945 - DNA, 23 bp, synthetic construct
  source 1..23: mol_type = other DNA
agattgtataaaaggctgggggc

SEQ ID NO: 2946 - DNA, 23 bp, synthetic construct
  source 1..23: mol_type = other DNA
agattgtataaaaggctgggggc

SEQ ID NO: 2947 - DNA, 23 bp, synthetic construct
  source 1..23: mol_type = other DNA
agattgtataaaaggctgggggc

SEQ ID NO: 2948 - DNA, 24 bp, synthetic construct
  source 1..24: mol_type = other DNA
agattgtataaaaggctgggggct

SEQ ID NO: 2949 - DNA, 24 bp, synthetic construct
  source 1..24: mol_type = other DNA
agattgtataaaaggctgggggct

SEQ ID NO: 2950 - DNA, 27 bp, synthetic construct
  source 1..27: mol_type = other DNA
agattgtataaaaggctgggggctggt

SEQ ID NO: 2951 - DNA, 23 bp, synthetic construct
  source 1..23: mol_type = other DNA
ataaaaggctgggggctggtggg

SEQ ID NO: 2952 - DNA, 23 bp, synthetic construct
  source 1..23: mol_type = other DNA
ataaaaggctgggggctggtggg

SEQ ID NO: 2953 - DNA, 23 bp, synthetic construct
  source 1..23: mol_type = other DNA
ataaaaggctgggggctggtggg

SEQ ID NO: 2954 - DNA, 23 bp, synthetic construct
  source 1..23: mol_type = other DNA
ataaaaggctgggggctggtggg

SEQ ID NO: 2955 - DNA, 22 bp, synthetic construct
  source 1..22: mol_type = other DNA
ataaaaggctgggggctggtgg

SEQ ID NO: 2956 - DNA, 22 bp, synthetic construct
  source 1..22: mol_type = other DNA
ataaaaggctgggggctggtgg

SEQ ID NO: 2957 - DNA, 23 bp, synthetic construct
  source 1..23: mol_type = other DNA
ataaaaggctgggggctggtggg

SEQ ID NO: 2958 - DNA, 23 bp, synthetic construct
  source 1..23: mol_type = other DNA
ataaaaggctgggggctggtggg

SEQ ID NO: 2959 - DNA, 23 bp, synthetic construct
  source 1..23: mol_type = other DNA
ataaaaggctgggggctggtggg

SEQ ID NO: 2960 - DNA, 23 bp, synthetic construct
  source 1..23: mol_type = other DNA
atctgtgttctggcacctgcggc

SEQ ID NO: 2961 - DNA, 23 bp, synthetic construct
  source 1..23: mol_type = other DNA
atctgtgttctggcacctgcggc

SEQ ID NO: 2962 - DNA, 22 bp, synthetic construct
  source 1..22: mol_type = other DNA
atctgtgttctggcacctgcgg

SEQ ID NO: 2963 - DNA, 22 bp, synthetic construct
  source 1..22: mol_type = other DNA
atctgtgttctggcacctgcgg

SEQ ID NO: 2964 - DNA, 23 bp, synthetic construct
  source 1..23: mol_type = other DNA
atctgtgttctggcacctgcggc

SEQ ID NO: 2965 - DNA, 23 bp, synthetic construct
  source 1..23: mol_type = other DNA
atctgtgttctggcacctgcggc

SEQ ID NO: 2966 - DNA, 23 bp, synthetic construct
  source 1..23: mol_type = other DNA
atctgtgttctggcacctgcggc

SEQ ID NO: 2967 - DNA, 24 bp, synthetic construct
  source 1..24: mol_type = other DNA
atctgtgttctggcacctgcggct

SEQ ID NO: 2968 - DNA, 24 bp, synthetic construct
  source 1..24: mol_type = other DNA
atctgtgttctggcacctgcggct

SEQ ID NO: 2969 - DNA, 23 bp, synthetic construct
  source 1..23: mol_type = other DNA
cacagattgtataaaaggctggg

SEQ ID NO: 2970 - DNA, 23 bp, synthetic construct
  source 1..23: mol_type = other DNA
cacagattgtataaaaggctggg

SEQ ID NO: 2971 - DNA, 23 bp, synthetic construct
  source 1..23: mol_type = other DNA
cacagattgtataaaaggctggg

SEQ ID NO: 2972 - DNA, 23 bp, synthetic construct
  source 1..23: mol_type = other DNA
cacagattgtataaaaggctggg

SEQ ID NO: 2973 - DNA, 23 bp, synthetic construct
  source 1..23: mol_type = other DNA
cacagattgtataaaaggctggg

SEQ ID NO: 2974 - DNA, 22 bp, synthetic construct
  source 1..22: mol_type = other DNA
cacagattgtataaaaggctgg

SEQ ID NO: 2975 - DNA, 22 bp, synthetic construct
  source 1..22: mol_type = other DNA
cacagattgtataaaaggctgg

SEQ ID NO: 2976 - DNA, 23 bp, synthetic construct
  source 1..23: mol_type = other DNA
cacagattgtataaaaggctggg

SEQ ID NO: 2977 - DNA, 23 bp, synthetic construct
  source 1..23: mol_type = other DNA
cacagattgtataaaaggctggg

SEQ ID NO: 2978 - DNA, 23 bp, synthetic construct
  source 1..23: mol_type = other DNA
cacagattgtataaaaggctggg

SEQ ID NO: 2979 - DNA, 23 bp, synthetic construct
  source 1..23: mol_type = other DNA
cagaacacagattgtataaaagg

SEQ ID NO: 2980 - DNA, 23 bp, synthetic construct
  source 1..23: mol_type = other DNA
cagaacacagattgtataaaagg

SEQ ID NO: 2981 - DNA, 23 bp, synthetic construct
  source 1..23: mol_type = other DNA
cagaacacagattgtataaaagg

SEQ ID NO: 2982 - DNA, 23 bp, synthetic construct
  source 1..23: mol_type = other DNA
cagaacacagattgtataaaagg

SEQ ID NO: 2983 - DNA, 23 bp, synthetic construct
  source 1..23: mol_type = other DNA
cagaacacagattgtataaaagg

SEQ ID NO: 2984 - DNA, 22 bp, synthetic construct
  source 1..22: mol_type = other DNA
cagaacacagattgtataaaag

SEQ ID NO: 2985 - DNA, 22 bp, synthetic construct
  source 1..22: mol_type = other DNA
cagaacacagattgtataaaag

SEQ ID NO: 2986 - DNA, 23 bp, synthetic construct
  source 1..23: mol_type = other DNA
cagaacacagattgtataaaagg

SEQ ID NO: 2987 - DNA, 23 bp, synthetic construct
  source 1..23: mol_type = other DNA
cagaacacagattgtataaaagg

SEQ ID NO: 2988 - DNA, 23 bp, synthetic construct
  source 1..23: mol_type = other DNA
cagaacacagattgtataaaagg

SEQ ID NO: 2989 - DNA, 24 bp, synthetic construct
  source 1..24: mol_type = other DNA
cagaacacagattgtataaaaggc

SEQ ID NO: 2990 - DNA, 23 bp, synthetic construct
  source 1..23: mol_type = other DNA
cagattgtataaaaggctggggg

SEQ ID NO: 2991 - DNA, 23 bp, synthetic construct
  source 1..23: mol_type = other DNA
cagattgtataaaaggctggggg

SEQ ID NO: 2992 - DNA, 23 bp, synthetic construct
  source 1..23: mol_type = other DNA
cagattgtataaaaggctggggg

SEQ ID NO: 2993 - DNA, 23 bp, synthetic construct
  source 1..23: mol_type = other DNA
cagattgtataaaaggctggggg

SEQ ID NO: 2994 - DNA, 23 bp, synthetic construct
  source 1..23: mol_type = other DNA
cagattgtataaaaggctggggg

SEQ ID NO: 2995 - DNA, 22 bp, synthetic construct
  source 1..22: mol_type = other DNA
cagattgtataaaaggctgggg

SEQ ID NO: 2996 - DNA, 22 bp, synthetic construct
  source 1..22: mol_type = other DNA
cagattgtataaaaggctgggg

SEQ ID NO: 2997 - DNA, 23 bp, synthetic construct
  source 1..23: mol_type = other DNA
cagattgtataaaaggctggggg

SEQ ID NO: 2998 - DNA, 23 bp, synthetic construct
  source 1..23: mol_type = other DNA
cagattgtataaaaggctggggg

SEQ ID NO: 2999 - DNA, 23 bp, synthetic construct
  source 1..23: mol_type = other DNA
cagattgtataaaaggctggggg

SEQ ID NO: 3000 - DNA, 24 bp, synthetic construct
  source 1..24: mol_type = other DNA
cagattgtataaaaggctgggggc

SEQ ID NO: 3001 - DNA, 23 bp, synthetic construct
  source 1..23: mol_type = other DNA
cagcccccagccttttatacaat

SEQ ID NO: 3002 - DNA, 23 bp, synthetic construct
  source 1..23: mol_type = other DNA
cagcccccagccttttatacaat

SEQ ID NO: 3003 - DNA, 23 bp, synthetic construct
  source 1..23: mol_type = other DNA
cagcccccagccttttatacaat

SEQ ID NO: 3004 - DNA, 24 bp, synthetic construct
  source 1..24: mol_type = other DNA
cagcccccagccttttatacaatc

SEQ ID NO: 3005 - DNA, 24 bp, synthetic construct
  source 1..24: mol_type = other DNA
cagcccccagccttttatacaatc

SEQ ID NO: 3006 - DNA, 27 bp, synthetic construct
  source 1..27: mol_type = other DNA
ccaccagcccccagccttttatacaat

SEQ ID NO: 3007 - DNA, 23 bp, synthetic construct
  source 1..23: mol_type = other DNA
ccagcccccagccttttatacaa

SEQ ID NO: 3008 - DNA, 23 bp, synthetic construct
  source 1..23: mol_type = other DNA
ccagcccccagccttttatacaa

SEQ ID NO: 3009 - DNA, 23 bp, synthetic construct
  source 1..23: mol_type = other DNA
ccagcccccagccttttatacaa

SEQ ID NO: 3010 - DNA, 24 bp, synthetic construct
  source 1..24: mol_type = other DNA
ccagcccccagccttttatacaat

SEQ ID NO: 3011 - DNA, 22 bp, synthetic construct
  source 1..22: mol_type = other DNA
ccagccttttatacaatctgtg

SEQ ID NO: 3012 - DNA, 22 bp, synthetic construct
  source 1..22: mol_type = other DNA
ccagccttttatacaatctgtg

SEQ ID NO: 3013 - DNA, 23 bp, synthetic construct
  source 1..23: mol_type = other DNA
ccagccttttatacaatctgtgt

SEQ ID NO: 3014 - DNA, 23 bp, synthetic construct
  source 1..23: mol_type = other DNA
ccagccttttatacaatctgtgt

SEQ ID NO: 3015 - DNA, 23 bp, synthetic construct
  source 1..23: mol_type = other DNA
ccagccttttatacaatctgtgt

SEQ ID NO: 3016 - DNA, 24 bp, synthetic construct
  source 1..24: mol_type = other DNA
ccagccttttatacaatctgtgtt

SEQ ID NO: 3017 - DNA, 24 bp, synthetic construct
  source 1..24: mol_type = other DNA
ccagccttttatacaatctgtgtt

SEQ ID NO: 3018 - DNA, 22 bp, synthetic construct
  source 1..22: mol_type = other DNA
ccccagccttttatacaatctg

SEQ ID NO: 3019 - DNA, 22 bp, synthetic construct
  source 1..22: mol_type = other DNA
ccccagccttttatacaatctg

SEQ ID NO: 3020 - DNA, 23 bp, synthetic construct
  source 1..23: mol_type = other DNA
ccccagccttttatacaatctgt

SEQ ID NO: 3021 - DNA, 23 bp, synthetic construct
  source 1..23: mol_type = other DNA
ccccagccttttatacaatctgt

SEQ ID NO: 3022 - DNA, 23 bp, synthetic construct
  source 1..23: mol_type = other DNA
ccccagccttttatacaatctgt

SEQ ID NO: 3023 - DNA, 23 bp, synthetic construct
  source 1..23: mol_type = other DNA
ctgggggctggtggggagcaggg

SEQ ID NO: 3024 - DNA, 23 bp, synthetic construct
  source 1..23: mol_type = other DNA
ctgggggctggtggggagcaggg

SEQ ID NO: 3025 - DNA, 23 bp, synthetic construct
  source 1..23: mol_type = other DNA
ctgggggctggtggggagcaggg

SEQ ID NO: 3026 - DNA, 23 bp, synthetic construct
  source 1..23: mol_type = other DNA
ctgggggctggtggggagcaggg

SEQ ID NO: 3027 - DNA, 23 bp, synthetic construct
  source 1..23: mol_type = other DNA
ctgggggctggtggggagcaggg

SEQ ID NO: 3028 - DNA, 22 bp, synthetic construct
  source 1..22: mol_type = other DNA
ctgggggctggtggggagcagg

SEQ ID NO: 3029 - DNA, 22 bp, synthetic construct
  source 1..22: mol_type = other DNA
ctgggggctggtggggagcagg

SEQ ID NO: 3030 - DNA, 23 bp, synthetic construct
  source 1..23: mol_type = other DNA
ctgggggctggtggggagcaggg

SEQ ID NO: 3031 - DNA, 23 bp, synthetic construct
  source 1..23: mol_type = other DNA
ctgggggctggtggggagcaggg

SEQ ID NO: 3032 - DNA, 23 bp, synthetic construct
  source 1..23: mol_type = other DNA
ctgggggctggtggggagcaggg

SEQ ID NO: 3033 - DNA, 23 bp, synthetic construct
  source 1..23: mol_type = other DNA
cttttatacaatctgtgttctgg

SEQ ID NO: 3034 - DNA, 23 bp, synthetic construct
  source 1..23: mol_type = other DNA
cttttatacaatctgtgttctgg

SEQ ID NO: 3035 - DNA, 23 bp, synthetic construct
  source 1..23: mol_type = other DNA
cttttatacaatctgtgttctgg

SEQ ID NO: 3036 - DNA, 23 bp, synthetic construct
  source 1..23: mol_type = other DNA
cttttatacaatctgtgttctgg

SEQ ID NO: 3037 - DNA, 23 bp, synthetic construct
  source 1..23: mol_type = other DNA
cttttatacaatctgtgttctgg

SEQ ID NO: 3038 - DNA, 22 bp, synthetic construct
  source 1..22: mol_type = other DNA
cttttatacaatctgtgttctg

SEQ ID NO: 3039 - DNA, 22 bp, synthetic construct
  source 1..22: mol_type = other DNA
cttttatacaatctgtgttctg

SEQ ID NO: 3040 - DNA, 23 bp, synthetic construct
  source 1..23: mol_type = other DNA
cttttatacaatctgtgttctgg

SEQ ID NO: 3041 - DNA, 23 bp, synthetic construct
  source 1..23: mol_type = other DNA
cttttatacaatctgtgttctgg

SEQ ID NO: 3042 - DNA, 23 bp, synthetic construct
  source 1..23: mol_type = other DNA
cttttatacaatctgtgttctgg

SEQ ID NO: 3043 - DNA, 24 bp, synthetic construct
  source 1..24: mol_type = other DNA
cttttatacaatctgtgttctggc

SEQ ID NO: 3044 - DNA, 23 bp, synthetic construct
  source 1..23: mol_type = other DNA
gctgggggctggtggggagcagg

SEQ ID NO: 3045 - DNA, 23 bp, synthetic construct
  source 1..23: mol_type = other DNA
gctgggggctggtggggagcagg

SEQ ID NO: 3046 - DNA, 23 bp, synthetic construct
  source 1..23: mol_type = other DNA
gctgggggctggtggggagcagg

SEQ ID NO: 3047 - DNA, 23 bp, synthetic construct
  source 1..23: mol_type = other DNA
gctgggggctggtggggagcagg

SEQ ID NO: 3048 - DNA, 23 bp, synthetic construct
  source 1..23: mol_type = other DNA
gctgggggctggtggggagcagg

SEQ ID NO: 3049 - DNA, 22 bp, synthetic construct
  source 1..22: mol_type = other DNA
gctgggggctggtggggagcag

SEQ ID NO: 3050 - DNA, 22 bp, synthetic construct
  source 1..22: mol_type = other DNA
gctgggggctggtggggagcag

SEQ ID NO: 3051 - DNA, 23 bp, synthetic construct
  source 1..23: mol_type = other DNA
gctgggggctggtggggagcagg

SEQ ID NO: 3052 - DNA, 23 bp, synthetic construct
  source 1..23: mol_type = other DNA
gctgggggctggtggggagcagg

SEQ ID NO: 3053 - DNA, 23 bp, synthetic construct
  source 1..23: mol_type = other DNA
gctgggggctggtggggagcagg

SEQ ID NO: 3054 - DNA, 23 bp, synthetic construct
  source 1..23: mol_type = other DNA
ggctgggggctggtggggagcag

SEQ ID NO: 3055 - DNA, 23 bp, synthetic construct
  source 1..23: mol_type = other DNA
ggctgggggctggtggggagcag

SEQ ID NO: 3056 - DNA, 23 bp, synthetic construct
  source 1..23: mol_type = other DNA
ggctgggggctggtggggagcag

SEQ ID NO: 3057 - DNA, 23 bp, synthetic construct
  source 1..23: mol_type = other DNA
taaaaggctgggggctggtgggg

SEQ ID NO: 3058 - DNA, 23 bp, synthetic construct
  source 1..23: mol_type = other DNA
taaaaggctgggggctggtgggg

SEQ ID NO: 3059 - DNA, 23 bp, synthetic construct
  source 1..23: mol_type = other DNA
taaaaggctgggggctggtgggg

SEQ ID NO: 3060 - DNA, 23 bp, synthetic construct
  source 1..23: mol_type = other DNA
taaaaggctgggggctggtgggg

SEQ ID NO: 3061 - DNA, 22 bp, synthetic construct
  source 1..22: mol_type = other DNA
taaaaggctgggggctggtggg

SEQ ID NO: 3062 - DNA, 22 bp, synthetic construct
  source 1..22: mol_type = other DNA
taaaaggctgggggctggtggg

SEQ ID NO: 3063 - DNA, 23 bp, synthetic construct
  source 1..23: mol_type = other DNA
taaaaggctgggggctggtgggg

SEQ ID NO: 3064 - DNA, 23 bp, synthetic construct
  source 1..23: mol_type = other DNA
taaaaggctgggggctggtgggg

SEQ ID NO: 3065 - DNA, 23 bp, synthetic construct
  source 1..23: mol_type = other DNA
taaaaggctgggggctggtgggg

SEQ ID NO: 3066 - DNA, 24 bp, synthetic construct
  source 1..24: mol_type = other DNA
taaaaggctgggggctggtgggga

SEQ ID NO: 3067 - DNA, 23 bp, synthetic construct
  source 1..23: mol_type = other DNA
tataaaaggctgggggctggtgg

SEQ ID NO: 3068 - DNA, 23 bp, synthetic construct
  source 1..23: mol_type = other DNA
tataaaaggctgggggctggtgg

SEQ ID NO: 3069 - DNA, 23 bp, synthetic construct
  source 1..23: mol_type = other DNA
tataaaaggctgggggctggtgg

SEQ ID NO: 3070 - DNA, 23 bp, synthetic construct
  source 1..23: mol_type = other DNA
tataaaaggctgggggctggtgg

SEQ ID NO: 3071 - DNA, 23 bp, synthetic construct
  source 1..23: mol_type = other DNA
tataaaaggctgggggctggtgg

SEQ ID NO: 3072 - DNA, 22 bp, synthetic construct
  source 1..22: mol_type = other DNA
tataaaaggctgggggctggtg

SEQ ID NO: 3073 - DNA, 22 bp, synthetic construct
  source 1..22: mol_type = other DNA
tataaaaggctgggggctggtg

SEQ ID NO: 3074 - DNA, 23 bp, synthetic construct
  source 1..23: mol_type = other DNA
tataaaaggctgggggctggtgg

SEQ ID NO: 3075 - DNA, 23 bp, synthetic construct
  source 1..23: mol_type = other DNA
tataaaaggctgggggctggtgg

SEQ ID NO: 3076 - DNA, 23 bp, synthetic construct
  source 1..23: mol_type = other DNA
tataaaaggctgggggctggtgg

SEQ ID NO: 3077 - DNA, 26 bp, synthetic construct
  source 1..26: mol_type = other DNA
attgtataaaaggctgggggctggtg

SEQ ID NO: 3078 - DNA, 26 bp, synthetic construct
  source 1..26: mol_type = other DNA
cttttatacaatctgtgttctggcac

SEQ ID NO: 3079 - DNA, 23 bp, synthetic construct
  source 1..23: mol_type = other DNA
tgggggctggtggggagcagggg

SEQ ID NO: 3080 - DNA, 23 bp, synthetic construct
  source 1..23: mol_type = other DNA
tgggggctggtggggagcagggg

SEQ ID NO: 3081 - DNA, 23 bp, synthetic construct
  source 1..23: mol_type = other DNA
tgggggctggtggggagcagggg

SEQ ID NO: 3082 - DNA, 23 bp, synthetic construct
  source 1..23: mol_type = other DNA
tgggggctggtggggagcagggg

SEQ ID NO: 3083 - DNA, 22 bp, synthetic construct
  source 1..22: mol_type = other DNA
tgggggctggtggggagcaggg

SEQ ID NO: 3084 - DNA, 23 bp, synthetic construct
  source 1..23: mol_type = other DNA
tgggggctggtggggagcagggg

SEQ ID NO: 3085 - DNA, 23 bp, synthetic construct
  source 1..23: mol_type = other DNA
tgggggctggtggggagcagggg

SEQ ID NO: 3086 - DNA, 23 bp, synthetic construct
  source 1..23: mol_type = other DNA
tgggggctggtggggagcagggg

SEQ ID NO: 3087 - DNA, 22 bp, synthetic construct
  source 1..22: mol_type = other DNA
tgtataaaaggctgggggctgg

SEQ ID NO: 3088 - DNA, 22 bp, synthetic construct
  source 1..22: mol_type = other DNA
tgtataaaaggctgggggctgg

SEQ ID NO: 3089 - DNA, 23 bp, synthetic construct
  source 1..23: mol_type = other DNA
tgtataaaaggctgggggctggt

SEQ ID NO: 3090 - DNA, 23 bp, synthetic construct
  source 1..23: mol_type = other DNA
tgtataaaaggctgggggctggt

SEQ ID NO: 3091 - DNA, 23 bp, synthetic construct
  source 1..23: mol_type = other DNA
tgtataaaaggctgggggctggt

SEQ ID NO: 3092 - DNA, 23 bp, synthetic construct
  source 1..23: mol_type = other DNA
ttatacaatctgtgttctggcac

SEQ ID NO: 3093 - DNA, 23 bp, synthetic construct
  source 1..23: mol_type = other DNA
ttatacaatctgtgttctggcac

SEQ ID NO: 3094 - DNA, 23 bp, synthetic construct
  source 1..23: mol_type = other DNA
ttatacaatctgtgttctggcac

SEQ ID NO: 3095 - DNA, 24 bp, synthetic construct
  source 1..24: mol_type = other DNA
ttatacaatctgtgttctggcacc

SEQ ID NO: 3096 - DNA, 24 bp, synthetic construct
  source 1..24: mol_type = other DNA
ttatacaatctgtgttctggcacc

SEQ ID NO: 3097 - DNA, 23 bp, synthetic construct
  source 1..23: mol_type = other DNA
ttgtataaaaggctgggggctgg

SEQ ID NO: 3098 - DNA, 23 bp, synthetic construct
  source 1..23: mol_type = other DNA
ttgtataaaaggctgggggctgg

SEQ ID NO: 3099 - DNA, 23 bp, synthetic construct
  source 1..23: mol_type = other DNA
ttgtataaaaggctgggggctgg

SEQ ID NO: 3100 - DNA, 23 bp, synthetic construct
  source 1..23: mol_type = other DNA
ttgtataaaaggctgggggctgg

SEQ ID NO: 3101 - DNA, 23 bp, synthetic construct
  source 1..23: mol_type = other DNA
ttgtataaaaggctgggggctgg

SEQ ID NO: 3102 - DNA, 23 bp, synthetic construct
  source 1..23: mol_type = other DNA
ttgtataaaaggctgggggctgg

SEQ ID NO: 3103 - DNA, 22 bp, synthetic construct
  source 1..22: mol_type = other DNA
ttgtataaaaggctgggggctg

SEQ ID NO: 3104 - DNA, 22 bp, synthetic construct
  source 1..22: mol_type = other DNA
ttgtataaaaggctgggggctg

SEQ ID NO: 3105 - DNA, 23 bp, synthetic construct
  source 1..23: mol_type = other DNA
ttgtataaaaggctgggggctgg

SEQ ID NO: 3106 - DNA, 23 bp, synthetic construct
  source 1..23: mol_type = other DNA
ttgtataaaaggctgggggctgg

SEQ ID NO: 3107 - DNA, 23 bp, synthetic construct
  source 1..23: mol_type = other DNA
ttgtataaaaggctgggggctgg

SEQ ID NO: 3108 - DNA, 24 bp, synthetic construct
  source 1..24: mol_type = other DNA
ttgtataaaaggctgggggctggt

SEQ ID NO: 3109 - DNA, 23 bp, synthetic construct
  source 1..23: mol_type = other DNA
ttttatacaatctgtgttctggc

SEQ ID NO: 3110 - DNA, 23 bp, synthetic construct
  source 1..23: mol_type = other DNA
ttttatacaatctgtgttctggc

SEQ ID NO: 3111 - DNA, 23 bp, synthetic construct
  source 1..23: mol_type = other DNA
ttttatacaatctgtgttctggc

SEQ ID NO: 3112 - DNA, 22 bp, synthetic construct
  source 1..22: mol_type = other DNA
ttttatacaatctgtgttctgg

SEQ ID NO: 3113 - DNA, 22 bp, synthetic construct
  source 1..22: mol_type = other DNA
ttttatacaatctgtgttctgg

SEQ ID NO: 3114 - DNA, 23 bp, synthetic construct
  source 1..23: mol_type = other DNA
ttttatacaatctgtgttctggc

SEQ ID NO: 3115 - DNA, 23 bp, synthetic construct
  source 1..23: mol_type = other DNA
ttttatacaatctgtgttctggc

SEQ ID NO: 3116 - DNA, 23 bp, synthetic construct
  source 1..23: mol_type = other DNA
ttttatacaatctgtgttctggc

SEQ ID NO: 3117 - DNA, 24 bp, synthetic construct
  source 1..24: mol_type = other DNA
ttttatacaatctgtgttctggca

SEQ ID NO: 3118 - DNA, 24 bp, synthetic construct
  source 1..24: mol_type = other DNA
ttttatacaatctgtgttctggca

SEQ ID NO: 3119 - DNA, 23 bp, synthetic construct
  source 1..23: mol_type = other DNA
aacgccatggggagcaatctcag

SEQ ID NO: 3120 - DNA, 23 bp, synthetic construct
  source 1..23: mol_type = other DNA
aacgccatggggagcaatctcag

SEQ ID NO: 3121 - DNA, 23 bp, synthetic construct
  source 1..23: mol_type = other DNA
acgccatggggagcaatctcagc

SEQ ID NO: 3122 - DNA, 23 bp, synthetic construct
  source 1..23: mol_type = other DNA
acgccatggggagcaatctcagc

SEQ ID NO: 3123 - DNA, 22 bp, synthetic construct
  source 1..22: mol_type = other DNA
acgccatggggagcaatctcag

SEQ ID NO: 3124 - DNA, 23 bp, synthetic construct
  source 1..23: mol_type = other DNA
acgccatggggagcaatctcagc

SEQ ID NO: 3125 - DNA, 23 bp, synthetic construct
  source 1..23: mol_type = other DNA
acgccatggggagcaatctcagc

SEQ ID NO: 3126 - DNA, 24 bp, synthetic construct
  source 1..24: mol_type = other DNA
acgccatggggagcaatctcagcc

SEQ ID NO: 3127 - DNA, 23 bp, synthetic construct
  source 1..23: mol_type = other DNA
agattgctccccatggcgttgga

SEQ ID NO: 3128 - DNA, 26 bp, synthetic construct
  source 1..26: mol_type = other DNA
cttccaacgccatggggagcaatctc

SEQ ID NO: 3129 - DNA, 22 bp, synthetic construct
  source 1..22: mol_type = other DNA
ccatggcgttggaaggcaggag

SEQ ID NO: 3130 - DNA, 23 bp, synthetic construct
  source 1..23: mol_type = other DNA
ccatggcgttggaaggcaggaga

SEQ ID NO: 3131 - DNA, 23 bp, synthetic construct
  source 1..23: mol_type = other DNA
ccatggcgttggaaggcaggaga

SEQ ID NO: 3132 - DNA, 23 bp, synthetic construct
  source 1..23: mol_type = other DNA
ccatggcgttggaaggcaggaga

SEQ ID NO: 3133 - DNA, 23 bp, synthetic construct
  source 1..23: mol_type = other DNA
cccatggcgttggaaggcaggag

SEQ ID NO: 3134 - DNA, 23 bp, synthetic construct
  source 1..23: mol_type = other DNA
cccatggcgttggaaggcaggag

SEQ ID NO: 3135 - DNA, 23 bp, synthetic construct
  source 1..23: mol_type = other DNA
cccatggcgttggaaggcaggag

SEQ ID NO: 3136 - DNA, 24 bp, synthetic construct
  source 1..24: mol_type = other DNA
cccatggcgttggaaggcaggaga

SEQ ID NO: 3137 - DNA, 23 bp, synthetic construct
  source 1..23: mol_type = other DNA
ccccatggcgttggaaggcagga

SEQ ID NO: 3138 - DNA, 22 bp, synthetic construct
  source 1..22: mol_type = other DNA
ccccatggcgttggaaggcagg

SEQ ID NO: 3139 - DNA, 22 bp, synthetic construct
  source 1..22: mol_type = other DNA
ccccatggcgttggaaggcagg

SEQ ID NO: 3140 - DNA, 23 bp, synthetic construct
  source 1..23: mol_type = other DNA
ccccatggcgttggaaggcagga

SEQ ID NO: 3141 - DNA, 23 bp, synthetic construct
  source 1..23: mol_type = other DNA
ccccatggcgttggaaggcagga

SEQ ID NO: 3142 - DNA, 23 bp, synthetic construct
  source 1..23: mol_type = other DNA
ccccatggcgttggaaggcagga

SEQ ID NO: 3143 - DNA, 23 bp, synthetic construct
  source 1..23: mol_type = other DNA
ccccatggcgttggaaggcagga

SEQ ID NO: 3144 - DNA, 23 bp, synthetic construct
  source 1..23: mol_type = other DNA
ccccatggcgttggaaggcagga

SEQ ID NO: 3145 - DNA, 23 bp, synthetic construct
  source 1..23: mol_type = other DNA
ctccccatggcgttggaaggcag

SEQ ID NO: 3146 - DNA, 23 bp, synthetic construct
  source 1..23: mol_type = other DNA
ctccccatggcgttggaaggcag

SEQ ID NO: 3147 - DNA, 23 bp, synthetic construct
  source 1..23: mol_type = other DNA
ctccccatggcgttggaaggcag

SEQ ID NO: 3148 - DNA, 26 bp, synthetic construct
  source 1..26: mol_type = other DNA
attgctccccatggcgttggaaggca

SEQ ID NO: 3149 - DNA, 23 bp, synthetic construct
  source 1..23: mol_type = other DNA
gagattgctccccatggcgttgg

SEQ ID NO: 3150 - DNA, 23 bp, synthetic construct
  source 1..23: mol_type = other DNA
tccccatggcgttggaaggcagg

SEQ ID NO: 3151 - DNA, 22 bp, synthetic construct
  source 1..22: mol_type = other DNA
tccccatggcgttggaaggcag

SEQ ID NO: 3152 - DNA, 22 bp, synthetic construct
  source 1..22: mol_type = other DNA
tccccatggcgttggaaggcag

SEQ ID NO: 3153 - DNA, 23 bp, synthetic construct
  source 1..23: mol_type = other DNA
tccccatggcgttggaaggcagg

SEQ ID NO: 3154 - DNA, 23 bp, synthetic construct
  source 1..23: mol_type = other DNA
tccccatggcgttggaaggcagg

SEQ ID NO: 3155 - DNA, 23 bp, synthetic construct
  source 1..23: mol_type = other DNA
tccccatggcgttggaaggcagg

SEQ ID NO: 3156 - DNA, 23 bp, synthetic construct
  source 1..23: mol_type = other DNA
tccccatggcgttggaaggcagg

SEQ ID NO: 3157 - DNA, 24 bp, synthetic construct
  source 1..24: mol_type = other DNA
tccccatggcgttggaaggcagga

SEQ ID NO: 3158 - DNA, 23 bp, synthetic construct
  source 1..23: mol_type = other DNA
tccccatggcgttggaaggcagg

SEQ ID NO: 3159 - DNA, 23 bp, synthetic construct
  source 1..23: mol_type = other DNA
tccccatggcgttggaaggcagg

SEQ ID NO: 3160 - DNA, 23 bp, synthetic construct
  source 1..23: mol_type = other DNA
tccccatggcgttggaaggcagg

SEQ ID NO: 3161 - DNA, 23 bp, synthetic construct
  source 1..23: mol_type = other DNA
tgctccccatggcgttggaaggc

SEQ ID NO: 3162 - DNA, 23 bp, synthetic construct
  source 1..23: mol_type = other DNA
tgctccccatggcgttggaaggc

SEQ ID NO: 3163 - DNA, 22 bp, synthetic construct
  source 1..22: mol_type = other DNA
tgctccccatggcgttggaagg

SEQ ID NO: 3164 - DNA, 22 bp, synthetic construct
  source 1..22: mol_type = other DNA
tgctccccatggcgttggaagg

SEQ ID NO: 3165 - DNA, 23 bp, synthetic construct
  source 1..23: mol_type = other DNA
tgctccccatggcgttggaaggc

SEQ ID NO: 3166 - DNA, 23 bp, synthetic construct
  source 1..23: mol_type = other DNA
tgctccccatggcgttggaaggc

SEQ ID NO: 3167 - DNA, 23 bp, synthetic construct
  source 1..23: mol_type = other DNA
tgctccccatggcgttggaaggc

SEQ ID NO: 3168 - DNA, 24 bp, synthetic construct
  source 1..24: mol_type = other DNA
tgctccccatggcgttggaaggca

SEQ ID NO: 3169 - DNA, 24 bp, synthetic construct
  source 1..24: mol_type = other DNA
tgctccccatggcgttggaaggca

SEQ ID NO: 3170 - DNA, 22 bp, synthetic construct
  source 1..22: mol_type = other DNA
ttgctccccatggcgttggaag

SEQ ID NO: 3171 - DNA, 23 bp, synthetic construct
  source 1..23: mol_type = other DNA
ttgctccccatggcgttggaagg

SEQ ID NO: 3172 - DNA, 23 bp, synthetic construct
  source 1..23: mol_type = other DNA
ttgctccccatggcgttggaagg

SEQ ID NO: 3173 - DNA, 24 bp, synthetic construct
  source 1..24: mol_type = other DNA
ttgctccccatggcgttggaaggc

SEQ ID NO: 3174 - DNA, 23 bp, synthetic construct
  source 1..23: mol_type = other DNA
ttgctccccatggcgttggaagg

SEQ ID NO: 3175 - DNA, 23 bp, synthetic construct
  source 1..23: mol_type = other DNA
ttgctccccatggcgttggaagg

SEQ ID NO: 3176 - DNA, 23 bp, synthetic construct
  source 1..23: mol_type = other DNA
ttgctccccatggcgttggaagg

SEQ ID NO: 3177 - RNA, 20 nt, synthetic construct
  source 1..20: mol_type = other RNA
aaaaggctgggggctggtgg

SEQ ID NO: 3178 - RNA, 20 nt, synthetic construct
  source 1..20: mol_type = other RNA
aaaaggctgggggctggtgg

SEQ ID NO: 3179 - RNA, 20 nt, synthetic construct
  source 1..20: mol_type = other RNA
aaaaggctgggggctggtgg

SEQ ID NO: 3180 - RNA, 20 nt, synthetic construct
  source 1..20: mol_type = other RNA
aaaaggctgggggctggtgg

SEQ ID NO: 3181 - RNA, 20 nt, synthetic construct
  source 1..20: mol_type = other RNA
aaaaggctgggggctggtgg

SEQ ID NO: 3182 - RNA, 20 nt, synthetic construct
  source 1..20: mol_type = other RNA
aaaaggctgggggctggtgg

SEQ ID NO: 3183 - RNA, 20 nt, synthetic construct
  source 1..20: mol_type = other RNA
aaaaggctgggggctggtgg

SEQ ID NO: 3184 - RNA, 20 nt, synthetic construct
  source 1..20: mol_type = other RNA
aaaaggctgggggctggtgg

SEQ ID NO: 3185 - RNA, 20 nt, synthetic construct
  source 1..20: mol_type = other RNA
aaaggctgggggctggtggg

SEQ ID NO: 3186 - RNA, 20 nt, synthetic construct
  source 1..20: mol_type = other RNA
aaaggctgggggctggtggg

SEQ ID NO: 3187 - RNA, 20 nt, synthetic construct
  source 1..20: mol_type = other RNA
aaaggctgggggctggtggg

SEQ ID NO: 3188 - RNA, 20 nt, synthetic construct
  source 1..20: mol_type = other RNA
aaaggctgggggctggtggg

SEQ ID NO: 3189 - RNA, 20 nt, synthetic construct
  source 1..20: mol_type = other RNA
aaggctgggggctggtgggg

SEQ ID NO: 3190 - RNA, 20 nt, synthetic construct
  source 1..20: mol_type = other RNA
aaggctgggggctggtgggg

SEQ ID NO: 3191 - RNA, 20 nt, synthetic construct
  source 1..20: mol_type = other RNA
aaggctgggggctggtgggg

SEQ ID NO: 3192 - RNA, 20 nt, synthetic construct
  source 1..20: mol_type = other RNA
aaggctgggggctggtgggg

SEQ ID NO: 3193 - RNA, 20 nt, synthetic construct
  source 1..20: mol_type = other RNA
aaggctgggggctggtgggg

SEQ ID NO: 3194 - RNA, 20 nt, synthetic construct
  source 1..20: mol_type = other RNA
aaggctgggggctggtgggg

SEQ ID NO: 3195 - RNA, 20 nt, synthetic construct
  source 1..20: mol_type = other RNA
aaggctgggggctggtgggg

SEQ ID NO: 3196 - RNA, 20 nt, synthetic construct
  source 1..20: mol_type = other RNA
aaggctgggggctggtgggg

SEQ ID NO: 3197 - RNA, 20 nt, synthetic construct
  source 1..20: mol_type = other RNA
aaggctgggggctggtgggg

SEQ ID NO: 3198 - RNA, 20 nt, synthetic construct
  source 1..20: mol_type = other RNA
aaggctgggggctggtgggg

SEQ ID NO: 3199 - RNA, 20 nt, synthetic construct
  source 1..20: mol_type = other RNA
aatctgtgttctggcacctg

SEQ ID NO: 3200 - RNA, 20 nt, synthetic construct
  source 1..20: mol_type = other RNA
aatctgtgttctggcacctg

SEQ ID NO: 3201 - RNA, 20 nt, synthetic construct
  source 1..20: mol_type = other RNA
aatctgtgttctggcacctg

SEQ ID NO: 3202 - RNA, 20 nt, synthetic construct
  source 1..20: mol_type = other RNA
aatctgtgttctggcacctg

SEQ ID NO: 3203 - RNA, 20 nt, synthetic construct
  source 1..20: mol_type = other RNA
aatctgtgttctggcacctg

SEQ ID NO: 3204 - RNA, 20 nt, synthetic construct
  source 1..20: mol_type = other RNA
aatctgtgttctggcacctg

SEQ ID NO: 3205 - RNA, 20 nt, synthetic construct
  source 1..20: mol_type = other RNA
aatctgtgttctggcacctg

SEQ ID NO: 3206 - RNA, 20 nt, synthetic construct
  source 1..20: mol_type = other RNA
aatctgtgttctggcacctg

SEQ ID NO: 3207 - RNA, 20 nt, synthetic construct
  source 1..20: mol_type = other RNA
aatctgtgttctggcacctg

SEQ ID NO: 3208 - RNA, 20 nt, synthetic construct
  source 1..20: mol_type = other RNA
aatctgtgttctggcacctg

SEQ ID NO: 3209 - RNA, 20 nt, synthetic construct
  source 1..20: mol_type = other RNA
acaatctgtgttctggcacc

SEQ ID NO: 3210 - RNA, 20 nt, synthetic construct
  source 1..20: mol_type = other RNA
acaatctgtgttctggcacc

SEQ ID NO: 3211 - RNA, 20 nt, synthetic construct
  source 1..20: mol_type = other RNA
acaatctgtgttctggcacc

SEQ ID NO: 3212 - RNA, 20 nt, synthetic construct
  source 1..20: mol_type = other RNA
acaatctgtgttctggcacc

SEQ ID NO: 3213 - RNA, 20 nt, synthetic construct
  source 1..20: mol_type = other RNA
acaatctgtgttctggcacc

SEQ ID NO: 3214 - RNA, 20 nt, synthetic construct
  source 1..20: mol_type = other RNA
acaatctgtgttctggcacc

SEQ ID NO: 3215 - RNA, 20 nt, synthetic construct
  source 1..20: mol_type = other RNA
acaatctgtgttctggcacc

SEQ ID NO: 3216 - RNA, 20 nt, synthetic construct
  source 1..20: mol_type = other RNA
acaatctgtgttctggcacc

SEQ ID NO: 3217 - RNA, 20 nt, synthetic construct
  source 1..20: mol_type = other RNA
acacagattgtataaaaggc

SEQ ID NO: 3218 - RNA, 20 nt, synthetic construct
  source 1..20: mol_type = other RNA
acacagattgtataaaaggc

SEQ ID NO: 3219 - RNA, 20 nt, synthetic construct
  source 1..20: mol_type = other RNA
acacagattgtataaaaggc

SEQ ID NO: 3220 - RNA, 20 nt, synthetic construct
  source 1..20: mol_type = other RNA
acacagattgtataaaaggc

SEQ ID NO: 3221 - RNA, 20 nt, synthetic construct
  source 1..20: mol_type = other RNA
acacagattgtataaaaggc

SEQ ID NO: 3222 - RNA, 20 nt, synthetic construct
  source 1..20: mol_type = other RNA
acacagattgtataaaaggc

SEQ ID NO: 3223 - RNA, 20 nt, synthetic construct
  source 1..20: mol_type = other RNA
acacagattgtataaaaggc

SEQ ID NO: 3224 - RNA, 20 nt, synthetic construct
  source 1..20: mol_type = other RNA
acacagattgtataaaaggc

SEQ ID NO: 3225 - RNA, 20 nt, synthetic construct
  source 1..20: mol_type = other RNA
acacagattgtataaaaggc

SEQ ID NO: 3226 - RNA, 20 nt, synthetic construct
  source 1..20: mol_type = other RNA
acacagattgtataaaaggc

SEQ ID NO: 3227 - RNA, 20 nt, synthetic construct
  source 1..20: mol_type = other RNA
acagattgtataaaaggctg

SEQ ID NO: 3228 - RNA, 20 nt, synthetic construct
  source 1..20: mol_type = other RNA
acagattgtataaaaggctg

SEQ ID NO: 3229 - RNA, 20 nt, synthetic construct
  source 1..20: mol_type = other RNA
acagattgtataaaaggctg

SEQ ID NO: 3230 - RNA, 20 nt, synthetic construct
  source 1..20: mol_type = other RNA
acagattgtataaaaggctg

SEQ ID NO: 3231 - RNA, 20 nt, synthetic construct
  source 1..20: mol_type = other RNA
acagattgtataaaaggctg

SEQ ID NO: 3232 - RNA, 20 nt, synthetic construct
  source 1..20: mol_type = other RNA
acagattgtataaaaggctg

SEQ ID NO: 3233 - RNA, 20 nt, synthetic construct
  source 1..20: mol_type = other RNA
acagattgtataaaaggctg

SEQ ID NO: 3234 - RNA, 20 nt, synthetic construct
  source 1..20: mol_type = other RNA
acagattgtataaaaggctg

SEQ ID NO: 3235 - RNA, 20 nt, synthetic construct
  source 1..20: mol_type = other RNA
acagattgtataaaaggctg

SEQ ID NO: 3236 - RNA, 20 nt, synthetic construct
  source 1..20: mol_type = other RNA
acagattgtataaaaggctg

SEQ ID NO: 3237 - RNA, 20 nt, synthetic construct
  source 1..20: mol_type = other RNA
agaacacagattgtataaaa

SEQ ID NO: 3238 - RNA, 20 nt, synthetic construct
  source 1..20: mol_type = other RNA
agaacacagattgtataaaa

SEQ ID NO: 3239 - RNA, 20 nt, synthetic construct
  source 1..20: mol_type = other RNA
agaacacagattgtataaaa

SEQ ID NO: 3240 - RNA, 20 nt, synthetic construct
  source 1..20: mol_type = other RNA
agaacacagattgtataaaa

SEQ ID NO: 3241 - RNA, 20 nt, synthetic construct
  source 1..20: mol_type = other RNA
agaacacagattgtataaaa

SEQ ID NO: 3242 - RNA, 20 nt, synthetic construct
  source 1..20: mol_type = other RNA
agaacacagattgtataaaa

SEQ ID NO: 3243 - RNA, 20 nt, synthetic construct
  source 1..20: mol_type = other RNA
agaacacagattgtataaaa

SEQ ID NO: 3244 - RNA, 20 nt, synthetic construct
  source 1..20: mol_type = other RNA
agaacacagattgtataaaa

SEQ ID NO: 3245 - RNA, 20 nt, synthetic construct
  source 1..20: mol_type = other RNA
agaacacagattgtataaaa

SEQ ID NO: 3246 - RNA, 20 nt, synthetic construct
  source 1..20: mol_type = other RNA
agattgtataaaaggctggg

SEQ ID NO: 3247 - RNA, 20 nt, synthetic construct
  source 1..20: mol_type = other RNA
agattgtataaaaggctggg

SEQ ID NO: 3248 - RNA, 20 nt, synthetic construct
  source 1..20: mol_type = other RNA
agattgtataaaaggctggg

SEQ ID NO: 3249 - RNA, 20 nt, synthetic construct
  source 1..20: mol_type = other RNA
agattgtataaaaggctggg

SEQ ID NO: 3250 - RNA, 20 nt, synthetic construct
  source 1..20: mol_type = other RNA
agattgtataaaaggctggg

SEQ ID NO: 3251 - RNA, 20 nt, synthetic construct
  source 1..20: mol_type = other RNA
agattgtataaaaggctggg

SEQ ID NO: 3252 - RNA, 20 nt, synthetic construct
  source 1..20: mol_type = other RNA
agattgtataaaaggctggg

SEQ ID NO: 3253 - RNA, 20 nt, synthetic construct
  source 1..20: mol_type = other RNA
agattgtataaaaggctggg

SEQ ID NO: 3254 - RNA, 20 nt, synthetic construct
  source 1..20: mol_type = other RNA
agattgtataaaaggctggg

SEQ ID NO: 3255 - RNA, 20 nt, synthetic construct
  source 1..20: mol_type = other RNA
agattgtataaaaggctggg

SEQ ID NO: 3256 - RNA, 21 nt, synthetic construct
  source 1..21: mol_type = other RNA
agattgtataaaaggctgggg

SEQ ID NO: 3257 - RNA, 20 nt, synthetic construct
  source 1..20: mol_type = other RNA
ataaaaggctgggggctggt

SEQ ID NO: 3258 - RNA, 20 nt, synthetic construct
  source 1..20: mol_type = other RNA
ataaaaggctgggggctggt

SEQ ID NO: 3259 - RNA, 20 nt, synthetic construct
  source 1..20: mol_type = other RNA
ataaaaggctgggggctggt

SEQ ID NO: 3260 - RNA, 20 nt, synthetic construct
  source 1..20: mol_type = other RNA
ataaaaggctgggggctggt

SEQ ID NO: 3261 - RNA, 20 nt, synthetic construct
  source 1..20: mol_type = other RNA
ataaaaggctgggggctggt

SEQ ID NO: 3262 - RNA, 20 nt, synthetic construct
  source 1..20: mol_type = other RNA
ataaaaggctgggggctggt

SEQ ID NO: 3263 - RNA, 20 nt, synthetic construct
  source 1..20: mol_type = other RNA
ataaaaggctgggggctggt

SEQ ID NO: 3264 - RNA, 20 nt, synthetic construct
  source 1..20: mol_type = other RNA
ataaaaggctgggggctggt

SEQ ID NO: 3265 - RNA, 20 nt, synthetic construct
  source 1..20: mol_type = other RNA
ataaaaggctgggggctggt

SEQ ID NO: 3266 - RNA, 20 nt, synthetic construct
  source 1..20: mol_type = other RNA
atctgtgttctggcacctgc

SEQ ID NO: 3267 - RNA, 20 nt, synthetic construct
  source 1..20: mol_type = other RNA
atctgtgttctggcacctgc

SEQ ID NO: 3268 - RNA, 20 nt, synthetic construct
  source 1..20: mol_type = other RNA
atctgtgttctggcacctgc

SEQ ID NO: 3269 - RNA, 20 nt, synthetic construct
  source 1..20: mol_type = other RNA
atctgtgttctggcacctgc

SEQ ID NO: 3270 - RNA, 20 nt, synthetic construct
  source 1..20: mol_type = other RNA
atctgtgttctggcacctgc

SEQ ID NO: 3271 - RNA, 20 nt, synthetic construct
  source 1..20: mol_type = other RNA
atctgtgttctggcacctgc

SEQ ID NO: 3272 - RNA, 20 nt, synthetic construct
  source 1..20: mol_type = other RNA
atctgtgttctggcacctgc

SEQ ID NO: 3273 - RNA, 20 nt, synthetic construct
  source 1..20: mol_type = other RNA
atctgtgttctggcacctgc

SEQ ID NO: 3274 - RNA, 20 nt, synthetic construct
  source 1..20: mol_type = other RNA
atctgtgttctggcacctgc

SEQ ID NO: 3275 - RNA, 20 nt, synthetic construct
  source 1..20: mol_type = other RNA
cacagattgtataaaaggct

SEQ ID NO: 3276 - RNA, 20 nt, synthetic construct
  source 1..20: mol_type = other RNA
cacagattgtataaaaggct

SEQ ID NO: 3277 - RNA, 20 nt, synthetic construct
  source 1..20: mol_type = other RNA
cacagattgtataaaaggct

SEQ ID NO: 3278 - RNA, 20 nt, synthetic construct
  source 1..20: mol_type = other RNA
cacagattgtataaaaggct

SEQ ID NO: 3279 - RNA, 20 nt, synthetic construct
  source 1..20: mol_type = other RNA
cacagattgtataaaaggct

SEQ ID NO: 3280 - RNA, 20 nt, synthetic construct
  source 1..20: mol_type = other RNA
cacagattgtataaaaggct

SEQ ID NO: 3281 - RNA, 20 nt, synthetic construct
  source 1..20: mol_type = other RNA
cacagattgtataaaaggct

SEQ ID NO: 3282 - RNA, 20 nt, synthetic construct
  source 1..20: mol_type = other RNA
cacagattgtataaaaggct

SEQ ID NO: 3283 - RNA, 20 nt, synthetic construct
  source 1..20: mol_type = other RNA
cacagattgtataaaaggct

SEQ ID NO: 3284 - RNA, 20 nt, synthetic construct
  source 1..20: mol_type = other RNA
cacagattgtataaaaggct

SEQ ID NO: 3285 - RNA, 20 nt, synthetic construct
  source 1..20: mol_type = other RNA
cagaacacagattgtataaa

SEQ ID NO: 3286 - RNA, 20 nt, synthetic construct
  source 1..20: mol_type = other RNA
cagaacacagattgtataaa

SEQ ID NO: 3287 - RNA, 20 nt, synthetic construct
  source 1..20: mol_type = other RNA
cagaacacagattgtataaa

SEQ ID NO: 3288 - RNA, 20 nt, synthetic construct
  source 1..20: mol_type = other RNA
cagaacacagattgtataaa

SEQ ID NO: 3289 - RNA, 20 nt, synthetic construct
  source 1..20: mol_type = other RNA
cagaacacagattgtataaa

SEQ ID NO: 3290 - RNA, 20 nt, synthetic construct
  source 1..20: mol_type = other RNA
cagaacacagattgtataaa

SEQ ID NO: 3291 - RNA, 20 nt, synthetic construct
  source 1..20: mol_type = other RNA
cagaacacagattgtataaa

SEQ ID NO: 3292 - RNA, 20 nt, synthetic construct
  source 1..20: mol_type = other RNA
cagaacacagattgtataaa

SEQ ID NO: 3293 - RNA, 20 nt, synthetic construct
  source 1..20: mol_type = other RNA
cagaacacagattgtataaa

SEQ ID NO: 3294 - RNA, 20 nt, synthetic construct
  source 1..20: mol_type = other RNA
cagaacacagattgtataaa

SEQ ID NO: 3295 - RNA, 20 nt, synthetic construct
  source 1..20: mol_type = other RNA
cagaacacagattgtataaa

SEQ ID NO: 3296 - RNA, 20 nt, synthetic construct
  source 1..20: mol_type = other RNA
cagattgtataaaaggctgg

SEQ ID NO: 3297 - RNA, 20 nt, synthetic construct
  source 1..20: mol_type = other RNA
cagattgtataaaaggctgg

SEQ ID NO: 3298 - RNA, 20 nt, synthetic construct
  source 1..20: mol_type = other RNA
cagattgtataaaaggctgg

SEQ ID NO: 3299 - RNA, 20 nt, synthetic construct
  source 1..20: mol_type = other RNA
cagattgtataaaaggctgg

SEQ ID NO: 3300 - RNA, 20 nt, synthetic construct
  source 1..20: mol_type = other RNA
cagattgtataaaaggctgg

SEQ ID NO: 3301 - RNA, 20 nt, synthetic construct
  source 1..20: mol_type = other RNA
cagattgtataaaaggctgg

SEQ ID NO: 3302 - RNA, 20 nt, synthetic construct
  source 1..20: mol_type = other RNA
cagattgtataaaaggctgg

SEQ ID NO: 3303 - RNA, 20 nt, synthetic construct
  source 1..20: mol_type = other RNA
cagattgtataaaaggctgg

SEQ ID NO: 3304 - RNA, 20 nt, synthetic construct
  source 1..20: mol_type = other RNA
cagattgtataaaaggctgg

SEQ ID NO: 3305 - RNA, 20 nt, synthetic construct
  source 1..20: mol_type = other RNA
cagattgtataaaaggctgg

SEQ ID NO: 3306 - RNA, 20 nt, synthetic construct
  source 1..20: mol_type = other RNA
cagattgtataaaaggctgg

SEQ ID NO: 3307 - RNA, 20 nt, synthetic construct
  source 1..20: mol_type = other RNA
cagcccccagccttttatac

SEQ ID NO: 3308 - RNA, 20 nt, synthetic construct
  source 1..20: mol_type = other RNA
cagcccccagccttttatac

SEQ ID NO: 3309 - RNA, 20 nt, synthetic construct
  source 1..20: mol_type = other RNA
cagcccccagccttttatac

SEQ ID NO: 3310 - RNA, 20 nt, synthetic construct
  source 1..20: mol_type = other RNA
cagcccccagccttttatac

SEQ ID NO: 3311 - RNA, 20 nt, synthetic construct
  source 1..20: mol_type = other RNA
cagcccccagccttttatac

SEQ ID NO: 3312 - RNA, 21 nt, synthetic construct
  source 1..21: mol_type = other RNA
ccaccagcccccagcctttta

SEQ ID NO: 3313 - RNA, 20 nt, synthetic construct
  source 1..20: mol_type = other RNA
ccagcccccagccttttata

SEQ ID NO: 3314 - RNA, 20 nt, synthetic construct
  source 1..20: mol_type = other RNA
ccagcccccagccttttata

SEQ ID NO: 3315 - RNA, 20 nt, synthetic construct
  source 1..20: mol_type = other RNA
ccagcccccagccttttata

SEQ ID NO: 3316 - RNA, 20 nt, synthetic construct
  source 1..20: mol_type = other RNA
ccagcccccagccttttata

SEQ ID NO: 3317 - RNA, 20 nt, synthetic construct
  source 1..20: mol_type = other RNA
ccagccttttatacaatctg

SEQ ID NO: 3318 - RNA, 20 nt, synthetic construct
  source 1..20: mol_type = other RNA
ccagccttttatacaatctg

SEQ ID NO: 3319 - RNA, 20 nt, synthetic construct
  source 1..20: mol_type = other RNA
ccagccttttatacaatctg

SEQ ID NO: 3320 - RNA, 20 nt, synthetic construct
  source 1..20: mol_type = other RNA
ccagccttttatacaatctg

SEQ ID NO: 3321 - RNA, 20 nt, synthetic construct
  source 1..20: mol_type = other RNA
ccagccttttatacaatctg

SEQ ID NO: 3322 - RNA, 20 nt, synthetic construct
  source 1..20: mol_type = other RNA
ccagccttttatacaatctg

SEQ ID NO: 3323 - RNA, 20 nt, synthetic construct
  source 1..20: mol_type = other RNA
ccagccttttatacaatctg

SEQ ID NO: 3324 - RNA, 20 nt, synthetic construct
  source 1..20: mol_type = other RNA
ccccagccttttatacaatc

SEQ ID NO: 3325 - RNA, 20 nt, synthetic construct
  source 1..20: mol_type = other RNA
ccccagccttttatacaatc

SEQ ID NO: 3326 - RNA, 20 nt, synthetic construct
  source 1..20: mol_type = other RNA
ccccagccttttatacaatc

SEQ ID NO: 3327 - RNA, 20 nt, synthetic construct
  source 1..20: mol_type = other RNA
ccccagccttttatacaatc

SEQ ID NO: 3328 - RNA, 20 nt, synthetic construct
  source 1..20: mol_type = other RNA
ccccagccttttatacaatc

SEQ ID NO: 3329 - RNA, 20 nt, synthetic construct
  source 1..20: mol_type = other RNA
ctgggggctggtggggagca

SEQ ID NO: 3330 - RNA, 20 nt, synthetic construct
  source 1..20: mol_type = other RNA
ctgggggctggtggggagca

SEQ ID NO: 3331 - RNA, 20 nt, synthetic construct
  source 1..20: mol_type = other RNA
ctgggggctggtggggagca

SEQ ID NO: 3332 - RNA, 20 nt, synthetic construct
  source 1..20: mol_type = other RNA
ctgggggctggtggggagca

SEQ ID NO: 3333 - RNA, 20 nt, synthetic construct
  source 1..20: mol_type = other RNA
ctgggggctggtggggagca

SEQ ID NO: 3334 - RNA, 20 nt, synthetic construct
  source 1..20: mol_type = other RNA
ctgggggctggtggggagca

SEQ ID NO: 3335 - RNA, 20 nt, synthetic construct
  source 1..20: mol_type = other RNA
ctgggggctggtggggagca

SEQ ID NO: 3336 - RNA, 20 nt, synthetic construct
  source 1..20: mol_type = other RNA
ctgggggctggtggggagca

SEQ ID NO: 3337 - RNA, 20 nt, synthetic construct
  source 1..20: mol_type = other RNA
ctgggggctggtggggagca

SEQ ID NO: 3338 - RNA, 20 nt, synthetic construct
  source 1..20: mol_type = other RNA
ctgggggctggtggggagca

SEQ ID NO: 3339 - RNA, 20 nt, synthetic construct
  source 1..20: mol_type = other RNA
cttttatacaatctgtgttc

SEQ ID NO: 3340 - RNA, 20 nt, synthetic construct
  source 1..20: mol_type = other RNA
cttttatacaatctgtgttc

SEQ ID NO: 3341 - RNA, 20 nt, synthetic construct
  source 1..20: mol_type = other RNA
cttttatacaatctgtgttc

SEQ ID NO: 3342 - RNA, 20 nt, synthetic construct
  source 1..20: mol_type = other RNA
cttttatacaatctgtgttc

SEQ ID NO: 3343 - RNA, 20 nt, synthetic construct
  source 1..20: mol_type = other RNA
cttttatacaatctgtgttc

SEQ ID NO: 3344 - RNA, 20 nt, synthetic construct
  source 1..20: mol_type = other RNA
cttttatacaatctgtgttc

SEQ ID NO: 3345 - RNA, 20 nt, synthetic construct
  source 1..20: mol_type = other RNA
cttttatacaatctgtgttc

SEQ ID NO: 3346 - RNA, 20 nt, synthetic construct
  source 1..20: mol_type = other RNA
cttttatacaatctgtgttc

SEQ ID NO: 3347 - RNA, 20 nt, synthetic construct
  source 1..20: mol_type = other RNA
cttttatacaatctgtgttc

SEQ ID NO: 3348 - RNA, 20 nt, synthetic construct
  source 1..20: mol_type = other RNA
cttttatacaatctgtgttc

SEQ ID NO: 3349 - RNA, 20 nt, synthetic construct
  source 1..20: mol_type = other RNA
cttttatacaatctgtgttc

SEQ ID NO: 3350 - RNA, 20 nt, synthetic construct
  source 1..20: mol_type = other RNA
gctgggggctggtggggagc

SEQ ID NO: 3351 - RNA, 20 nt, synthetic construct
  source 1..20: mol_type = other RNA
gctgggggctggtggggagc

SEQ ID NO: 3352 - RNA, 20 nt, synthetic construct
  source 1..20: mol_type = other RNA
gctgggggctggtggggagc

SEQ ID NO: 3353 - RNA, 20 nt, synthetic construct
  source 1..20: mol_type = other RNA
gctgggggctggtggggagc

SEQ ID NO: 3354 - RNA, 20 nt, synthetic construct
  source 1..20: mol_type = other RNA
gctgggggctggtggggagc

SEQ ID NO: 3355 - RNA, 20 nt, synthetic construct
  source 1..20: mol_type = other RNA
gctgggggctggtggggagc

SEQ ID NO: 3356 - RNA, 20 nt, synthetic construct
  source 1..20: mol_type = other RNA
gctgggggctggtggggagc

SEQ ID NO: 3357 - RNA, 20 nt, synthetic construct
  source 1..20: mol_type = other RNA
gctgggggctggtggggagc

SEQ ID NO: 3358 - RNA, 20 nt, synthetic construct
  source 1..20: mol_type = other RNA
gctgggggctggtggggagc

SEQ ID NO: 3359 - RNA, 20 nt, synthetic construct
  source 1..20: mol_type = other RNA
gctgggggctggtggggagc

SEQ ID NO: 3360 - RNA, 20 nt, synthetic construct
  source 1..20: mol_type = other RNA
ggctgggggctggtggggag

SEQ ID NO: 3361 - RNA, 20 nt, synthetic construct
  source 1..20: mol_type = other RNA
ggctgggggctggtggggag

SEQ ID NO: 3362 - RNA, 20 nt, synthetic construct
  source 1..20: mol_type = other RNA
ggctgggggctggtggggag

SEQ ID NO: 3363 - RNA, 20 nt, synthetic construct
  source 1..20: mol_type = other RNA
taaaaggctgggggctggtg

SEQ ID NO: 3364 - RNA, 20 nt, synthetic construct
  source 1..20: mol_type = other RNA
taaaaggctgggggctggtg

SEQ ID NO: 3365 - RNA, 20 nt, synthetic construct
  source 1..20: mol_type = other RNA
taaaaggctgggggctggtg

SEQ ID NO: 3366 - RNA, 20 nt, synthetic construct
  source 1..20: mol_type = other RNA
taaaaggctgggggctggtg

SEQ ID NO: 3367 - RNA, 20 nt, synthetic construct
  source 1..20: mol_type = other RNA
taaaaggctgggggctggtg

SEQ ID NO: 3368 - RNA, 20 nt, synthetic construct
  source 1..20: mol_type = other RNA
taaaaggctgggggctggtg

SEQ ID NO: 3369 - RNA, 20 nt, synthetic construct
  source 1..20: mol_type = other RNA
taaaaggctgggggctggtg

SEQ ID NO: 3370 - RNA, 20 nt, synthetic construct
  source 1..20: mol_type = other RNA
taaaaggctgggggctggtg

SEQ ID NO: 3371 - RNA, 20 nt, synthetic construct
  source 1..20: mol_type = other RNA
taaaaggctgggggctggtg

SEQ ID NO: 3372 - RNA, 20 nt, synthetic construct
  source 1..20: mol_type = other RNA
taaaaggctgggggctggtg

SEQ ID NO: 3373 - RNA, 20 nt, synthetic construct
  source 1..20: mol_type = other RNA
tataaaaggctgggggctgg

SEQ ID NO: 3374 - RNA, 20 nt, synthetic construct
  source 1..20: mol_type = other RNA
tataaaaggctgggggctgg

SEQ ID NO: 3375 - RNA, 20 nt, synthetic construct
  source 1..20: mol_type = other RNA
tataaaaggctgggggctgg

SEQ ID NO: 3376 - RNA, 20 nt, synthetic construct
  source 1..20: mol_type = other RNA
tataaaaggctgggggctgg

SEQ ID NO: 3377 - RNA, 20 nt, synthetic construct
  source 1..20: mol_type = other RNA
tataaaaggctgggggctgg

SEQ ID NO: 3378 - RNA, 20 nt, synthetic construct
  source 1..20: mol_type = other RNA
tataaaaggctgggggctgg

SEQ ID NO: 3379 - RNA, 20 nt, synthetic construct
  source 1..20: mol_type = other RNA
tataaaaggctgggggctgg

SEQ ID NO: 3380 - RNA, 20 nt, synthetic construct
  source 1..20: mol_type = other RNA
tataaaaggctgggggctgg

SEQ ID NO: 3381 - RNA, 20 nt, synthetic construct
  source 1..20: mol_type = other RNA
tataaaaggctgggggctgg

SEQ ID NO: 3382 - RNA, 20 nt, synthetic construct
  source 1..20: mol_type = other RNA
tataaaaggctgggggctgg

SEQ ID NO: 3383 - RNA, 22 nt, synthetic construct
  source 1..22: mol_type = other RNA
tataaaaggctgggggctggtg

SEQ ID NO: 3384 - RNA, 22 nt, synthetic construct
  source 1..22: mol_type = other RNA
tatacaatctgtgttctggcac

SEQ ID NO: 3385 - RNA, 20 nt, synthetic construct
  source 1..20: mol_type = other RNA
tgggggctggtggggagcag

SEQ ID NO: 3386 - RNA, 20 nt, synthetic construct
  source 1..20: mol_type = other RNA
tgggggctggtggggagcag

SEQ ID NO: 3387 - RNA, 20 nt, synthetic construct
  source 1..20: mol_type = other RNA
tgggggctggtggggagcag

SEQ ID NO: 3388 - RNA, 20 nt, synthetic construct
  source 1..20: mol_type = other RNA
tgggggctggtggggagcag

SEQ ID NO: 3389 - RNA, 20 nt, synthetic construct
  source 1..20: mol_type = other RNA
tgggggctggtggggagcag

SEQ ID NO: 3390 - RNA, 20 nt, synthetic construct
  source 1..20: mol_type = other RNA
tgggggctggtggggagcag

SEQ ID NO: 3391 - RNA, 20 nt, synthetic construct
  source 1..20: mol_type = other RNA
tgggggctggtggggagcag

SEQ ID NO: 3392 - RNA, 20 nt, synthetic construct
  source 1..20: mol_type = other RNA
tgggggctggtggggagcag

SEQ ID NO: 3393 - RNA, 20 nt, synthetic construct
  source 1..20: mol_type = other RNA
tgtataaaaggctgggggct

SEQ ID NO: 3394 - RNA, 20 nt, synthetic construct
  source 1..20: mol_type = other RNA
tgtataaaaggctgggggct

SEQ ID NO: 3395 - RNA, 20 nt, synthetic construct
  source 1..20: mol_type = other RNA
tgtataaaaggctgggggct

SEQ ID NO: 3396 - RNA, 20 nt, synthetic construct
  source 1..20: mol_type = other RNA
tgtataaaaggctgggggct

SEQ ID NO: 3397 - RNA, 20 nt, synthetic construct
  source 1..20: mol_type = other RNA
tgtataaaaggctgggggct

SEQ ID NO: 3398 - RNA, 20 nt, synthetic construct
  source 1..20: mol_type = other RNA
ttatacaatctgtgttctgg

SEQ ID NO: 3399 - RNA, 20 nt, synthetic construct
  source 1..20: mol_type = other RNA
ttatacaatctgtgttctgg

SEQ ID NO: 3400 - RNA, 20 nt, synthetic construct
  source 1..20: mol_type = other RNA
ttatacaatctgtgttctgg

SEQ ID NO: 3401 - RNA, 20 nt, synthetic construct
  source 1..20: mol_type = other RNA
ttatacaatctgtgttctgg

SEQ ID NO: 3402 - RNA, 20 nt, synthetic construct
  source 1..20: mol_type = other RNA
ttatacaatctgtgttctgg

SEQ ID NO: 3403 - RNA, 20 nt, synthetic construct
  source 1..20: mol_type = other RNA
ttgtataaaaggctgggggc

SEQ ID NO: 3404 - RNA, 20 nt, synthetic construct
  source 1..20: mol_type = other RNA
ttgtataaaaggctgggggc

SEQ ID NO: 3405 - RNA, 20 nt, synthetic construct
  source 1..20: mol_type = other RNA
ttgtataaaaggctgggggc

SEQ ID NO: 3406 - RNA, 20 nt, synthetic construct
  source 1..20: mol_type = other RNA
ttgtataaaaggctgggggc

SEQ ID NO: 3407 - RNA, 20 nt, synthetic construct
  source 1..20: mol_type = other RNA
ttgtataaaaggctgggggc

SEQ ID NO: 3408 - RNA, 20 nt, synthetic construct
  source 1..20: mol_type = other RNA
ttgtataaaaggctgggggc

SEQ ID NO: 3409 - RNA, 20 nt, synthetic construct
  source 1..20: mol_type = other RNA
ttgtataaaaggctgggggc

SEQ ID NO: 3410 - RNA, 20 nt, synthetic construct
  source 1..20: mol_type = other RNA
ttgtataaaaggctgggggc

SEQ ID NO: 3411 - RNA, 20 nt, synthetic construct
  source 1..20: mol_type = other RNA
ttgtataaaaggctgggggc

SEQ ID NO: 3412 - RNA, 20 nt, synthetic construct
  source 1..20: mol_type = other RNA
ttgtataaaaggctgggggc

SEQ ID NO: 3413 - RNA, 20 nt, synthetic construct
  source 1..20: mol_type = other RNA
ttgtataaaaggctgggggc

SEQ ID NO: 3414 - RNA, 20 nt, synthetic construct
  source 1..20: mol_type = other RNA
ttgtataaaaggctgggggc

SEQ ID NO: 3415 - RNA, 20 nt, synthetic construct
  source 1..20: mol_type = other RNA
ttttatacaatctgtgttct

SEQ ID NO: 3416 - RNA, 20 nt, synthetic construct
  source 1..20: mol_type = other RNA
ttttatacaatctgtgttct

SEQ ID NO: 3417 - RNA, 20 nt, synthetic construct
  source 1..20: mol_type = other RNA
ttttatacaatctgtgttct

SEQ ID NO: 3418 - RNA, 20 nt, synthetic construct
  source 1..20: mol_type = other RNA
ttttatacaatctgtgttct

SEQ ID NO: 3419 - RNA, 20 nt, synthetic construct
  source 1..20: mol_type = other RNA
ttttatacaatctgtgttct

SEQ ID NO: 3420 - RNA, 20 nt, synthetic construct
  source 1..20: mol_type = other RNA
ttttatacaatctgtgttct

SEQ ID NO: 3421 - RNA, 20 nt, synthetic construct
  source 1..20: mol_type = other RNA
ttttatacaatctgtgttct

SEQ ID NO: 3422 - RNA, 20 nt, synthetic construct
  source 1..20: mol_type = other RNA
ttttatacaatctgtgttct

SEQ ID NO: 3423 - RNA, 20 nt, synthetic construct
  source 1..20: mol_type = other RNA
ttttatacaatctgtgttct

SEQ ID NO: 3424 - RNA, 20 nt, synthetic construct
  source 1..20: mol_type = other RNA
ttttatacaatctgtgttct

SEQ ID NO: 3425 - RNA, 20 nt, synthetic construct
  source 1..20: mol_type = other RNA
aacgccatggggagcaatct

SEQ ID NO: 3426 - RNA, 20 nt, synthetic construct
  source 1..20: mol_type = other RNA
aacgccatggggagcaatct

SEQ ID NO: 3427 - RNA, 20 nt, synthetic construct
  source 1..20: mol_type = other RNA
acgccatggggagcaatctc

SEQ ID NO: 3428 - RNA, 20 nt, synthetic construct
  source 1..20: mol_type = other RNA
acgccatggggagcaatctc

SEQ ID NO: 3429 - RNA, 20 nt, synthetic construct
  source 1..20: mol_type = other RNA
acgccatggggagcaatctc

SEQ ID NO: 3430 - RNA, 20 nt, synthetic construct
  source 1..20: mol_type = other RNA
acgccatggggagcaatctc

SEQ ID NO: 3431 - RNA, 20 nt, synthetic construct
  source 1..20: mol_type = other RNA
acgccatggggagcaatctc

SEQ ID NO: 3432 - RNA, 20 nt, synthetic construct
  source 1..20: mol_type = other RNA
acgccatggggagcaatctc

SEQ ID NO: 3433 - RNA, 20 nt, synthetic construct
  source 1..20: mol_type = other RNA
agattgctccccatggcgtt

SEQ ID NO: 3434 - RNA, 22 nt, synthetic construct
  source 1..22: mol_type = other RNA
caacgccatggggagcaatctc

SEQ ID NO: 3435 - RNA, 20 nt, synthetic construct
  source 1..20: mol_type = other RNA
ccatggcgttggaaggcagg

SEQ ID NO: 3436 - RNA, 20 nt, synthetic construct
  source 1..20: mol_type = other RNA
ccatggcgttggaaggcagg

SEQ ID NO: 3437 - RNA, 20 nt, synthetic construct
  source 1..20: mol_type = other RNA
ccatggcgttggaaggcagg

SEQ ID NO: 3438 - RNA, 20 nt, synthetic construct
  source 1..20: mol_type = other RNA
ccatggcgttggaaggcagg

SEQ ID NO: 3439 - RNA, 20 nt, synthetic construct
  source 1..20: mol_type = other RNA
cccatggcgttggaaggcag

SEQ ID NO: 3440 - RNA, 20 nt, synthetic construct
  source 1..20: mol_type = other RNA
cccatggcgttggaaggcag

SEQ ID NO: 3441 - RNA, 20 nt, synthetic construct
  source 1..20: mol_type = other RNA
cccatggcgttggaaggcag

SEQ ID NO: 3442 - RNA, 20 nt, synthetic construct
  source 1..20: mol_type = other RNA
cccatggcgttggaaggcag

SEQ ID NO: 3443 - RNA, 20 nt, synthetic construct
  source 1..20: mol_type = other RNA
ccccatggcgttggaaggca

SEQ ID NO: 3444 - RNA, 20 nt, synthetic construct
  source 1..20: mol_type = other RNA
ccccatggcgttggaaggca

SEQ ID NO: 3445 - RNA, 20 nt, synthetic construct
  source 1..20: mol_type = other RNA
ccccatggcgttggaaggca

SEQ ID NO: 3446 - RNA, 20 nt, synthetic construct
  source 1..20: mol_type = other RNA
ccccatggcgttggaaggca

SEQ ID NO: 3447 - RNA, 20 nt, synthetic construct
  source 1..20: mol_type = other RNA
ccccatggcgttggaaggca

SEQ ID NO: 3448 - RNA, 20 nt, synthetic construct
  source 1..20: mol_type = other RNA
ccccatggcgttggaaggca

SEQ ID NO: 3449 - RNA, 20 nt, synthetic construct
  source 1..20: mol_type = other RNA
ccccatggcgttggaaggca

SEQ ID NO: 3450 - RNA, 20 nt, synthetic construct
  source 1..20: mol_type = other RNA
ccccatggcgttggaaggca

SEQ ID NO: 3451 - RNA, 20 nt, synthetic construct
  source 1..20: mol_type = other RNA
ctccccatggcgttggaagg

SEQ ID NO: 3452 - RNA, 20 nt, synthetic construct
  source 1..20: mol_type = other RNA
ctccccatggcgttggaagg

SEQ ID NO: 3453 - RNA, 20 nt, synthetic construct
  source 1..20: mol_type = other RNA
ctccccatggcgttggaagg

SEQ ID NO: 3454 - RNA, 22 nt, synthetic construct
  source 1..22: mol_type = other RNA
ctccccatggcgttggaaggca

SEQ ID NO: 3455 - RNA, 20 nt, synthetic construct
  source 1..20: mol_type = other RNA
gagattgctccccatggcgt

SEQ ID NO: 3456 - RNA, 20 nt, synthetic construct
  source 1..20: mol_type = other RNA
tccccatggcgttggaaggc

SEQ ID NO: 3457 - RNA, 20 nt, synthetic construct
  source 1..20: mol_type = other RNA
tccccatggcgttggaaggc

SEQ ID NO: 3458 - RNA, 20 nt, synthetic construct
  source 1..20: mol_type = other RNA
tccccatggcgttggaaggc

SEQ ID NO: 3459 - RNA, 20 nt, synthetic construct
  source 1..20: mol_type = other RNA
tccccatggcgttggaaggc

SEQ ID NO: 3460 - RNA, 20 nt, synthetic construct
  source 1..20: mol_type = other RNA
tccccatggcgttggaaggc

SEQ ID NO: 3461 - RNA, 20 nt, synthetic construct
  source 1..20: mol_type = other RNA
tccccatggcgttggaaggc

SEQ ID NO: 3462 - RNA, 20 nt, synthetic construct
  source 1..20: mol_type = other RNA
tccccatggcgttggaaggc

SEQ ID NO: 3463 - RNA, 20 nt, synthetic construct
  source 1..20: mol_type = other RNA
tccccatggcgttggaaggc

SEQ ID NO: 3464 - RNA, 20 nt, synthetic construct
  source 1..20: mol_type = other RNA
tccccatggcgttggaaggc

SEQ ID NO: 3465 - RNA, 20 nt, synthetic construct
  source 1..20: mol_type = other RNA
tccccatggcgttggaaggc

SEQ ID NO: 3466 - RNA, 20 nt, synthetic construct
  source 1..20: mol_type = other RNA
tccccatggcgttggaaggc

SEQ ID NO: 3467 - RNA, 20 nt, synthetic construct
  source 1..20: mol_type = other RNA
tgctccccatggcgttggaa

SEQ ID NO: 3468 - RNA, 20 nt, synthetic construct
  source 1..20: mol_type = other RNA
tgctccccatggcgttggaa

SEQ ID NO: 3469 - RNA, 20 nt, synthetic construct
  source 1..20: mol_type = other RNA
tgctccccatggcgttggaa

SEQ ID NO: 3470 - RNA, 20 nt, synthetic construct
  source 1..20: mol_type = other RNA
tgctccccatggcgttggaa

SEQ ID NO: 3471 - RNA, 20 nt, synthetic construct
  source 1..20: mol_type = other RNA
tgctccccatggcgttggaa

SEQ ID NO: 3472 - RNA, 20 nt, synthetic construct
  source 1..20: mol_type = other RNA
tgctccccatggcgttggaa

SEQ ID NO: 3473 - RNA, 20 nt, synthetic construct
  source 1..20: mol_type = other RNA
tgctccccatggcgttggaa

SEQ ID NO: 3474 - RNA, 20 nt, synthetic construct
  source 1..20: mol_type = other RNA
tgctccccatggcgttggaa

SEQ ID NO: 3475 - RNA, 20 nt, synthetic construct
  source 1..20: mol_type = other RNA
tgctccccatggcgttggaa

SEQ ID NO: 3476 - RNA, 20 nt, synthetic construct
  source 1..20: mol_type = other RNA
ttgctccccatggcgttgga

SEQ ID NO: 3477 - RNA, 20 nt, synthetic construct
  source 1..20: mol_type = other RNA
ttgctccccatggcgttgga

SEQ ID NO: 3478 - RNA, 20 nt, synthetic construct
  source 1..20: mol_type = other RNA
ttgctccccatggcgttgga

SEQ ID NO: 3479 - RNA, 20 nt, synthetic construct
  source 1..20: mol_type = other RNA
ttgctccccatggcgttgga

SEQ ID NO: 3480 - RNA, 20 nt, synthetic construct
  source 1..20: mol_type = other RNA
ttgctccccatggcgttgga

SEQ ID NO: 3481 - RNA, 20 nt, synthetic construct
  source 1..20: mol_type = other RNA
ttgctccccatggcgttgga

SEQ ID NO: 3482 - RNA, 20 nt, synthetic construct
  source 1..20: mol_type = other RNA
ttgctccccatggcgttgga

SEQ ID NO: 3483 - DNA, 23 bp, synthetic construct
  source 1..23: mol_type = other DNA
cagaacacagattgtataaaagg

SEQ ID NO: 3484 - DNA, 23 bp, synthetic construct
  source 1..23: mol_type = other DNA
acacagattgtataaaaggctgg

SEQ ID NO: 3485 - DNA, 23 bp, synthetic construct
  source 1..23: mol_type = other DNA
cacagattgtataaaaggctggg

SEQ ID NO: 3486 - DNA, 23 bp, synthetic construct
  source 1..23: mol_type = other DNA
acagattgtataaaaggctgggg

SEQ ID NO: 3487 - DNA, 23 bp, synthetic construct
  source 1..23: mol_type = other DNA
cagattgtataaaaggctggggg

SEQ ID NO: 3488 - DNA, 23 bp, synthetic construct
  source 1..23: mol_type = other DNA
tataaaaggctgggggctggtgg

SEQ ID NO: 3489 - DNA, 23 bp, synthetic construct
  source 1..23: mol_type = other DNA
ataaaaggctgggggctggtggg

SEQ ID NO: 3490 - DNA, 23 bp, synthetic construct
  source 1..23: mol_type = other DNA
taaaaggctgggggctggtgggg

SEQ ID NO: 3491 - DNA, 23 bp, synthetic construct
  source 1..23: mol_type = other DNA
cttttatacaatctgtgttctgg

SEQ ID NO: 3492 - DNA, 23 bp, synthetic construct
  source 1..23: mol_type = other DNA
aatctgtgttctggcacctgcgg

SEQ ID NO: 3493 - DNA, 23 bp, synthetic construct
  source 1..23: mol_type = other DNA
aaaaggctgggggctggtgggga

SEQ ID NO: 3494 - DNA, 23 bp, synthetic construct
  source 1..23: mol_type = other DNA
agaacacagattgtataaaaggc

SEQ ID NO: 3495 - DNA, 23 bp, synthetic construct
  source 1..23: mol_type = other DNA
atctgtgttctggcacctgcggc

SEQ ID NO: 3496 - DNA, 27 bp, synthetic construct
  source 1..27: mol_type = other DNA
agattgtataaaaggctgggggctggt

SEQ ID NO: 3497 - DNA, 27 bp, synthetic construct
  source 1..27: mol_type = other DNA
ccaccagcccccagccttttatacaat

SEQ ID NO: 3498 - DNA, 23 bp, synthetic construct
  source 1..23: mol_type = other DNA
tgctccccatggcgttggaaggc

SEQ ID NO: 3499 - DNA, 23 bp, synthetic construct
  source 1..23: mol_type = other DNA
ttgctccccatggcgttggaagg

SEQ ID NO: 3500 - DNA, 23 bp, synthetic construct
  source 1..23: mol_type = other DNA
gagattgctccccatggcgttgg

SEQ ID NO: 3501 - DNA, 23 bp, synthetic construct
  source 1..23: mol_type = other DNA
ccccatggcgttggaaggcagga

SEQ ID NO: 3502 - DNA, 23 bp, synthetic construct
  source 1..23: mol_type = other DNA
ccatggcgttggaaggcaggaga

SEQ ID NO: 3503 - DNA, 23 bp, synthetic construct
  source 1..23: mol_type = other DNA
agattgctccccatggcgttgga

SEQ ID NO: 3504 - RNA, 20 nt, synthetic construct
  source 1..20: mol_type = other RNA
cagaacacagattgtataaa

SEQ ID NO: 3505 - RNA, 20 nt, synthetic construct
  source 1..20: mol_type = other RNA
acacagattgtataaaaggc

SEQ ID NO: 3506 - RNA, 20 nt, synthetic construct
  source 1..20: mol_type = other RNA
cacagattgtataaaaggct

SEQ ID NO: 3507 - RNA, 20 nt, synthetic construct
  source 1..20: mol_type = other RNA
acagattgtataaaaggctg

SEQ ID NO: 3508 - RNA, 20 nt, synthetic construct
  source 1..20: mol_type = other RNA
cagattgtataaaaggctgg

SEQ ID NO: 3509 - RNA, 20 nt, synthetic construct
  source 1..20: mol_type = other RNA
tataaaaggctgggggctgg

SEQ ID NO: 3510 - RNA, 20 nt, synthetic construct
  source 1..20: mol_type = other RNA
ataaaaggctgggggctggt

SEQ ID NO: 3511 - RNA, 20 nt, synthetic construct
  source 1..20: mol_type = other RNA
taaaaggctgggggctggtg

SEQ ID NO: 3512 - RNA, 20 nt, synthetic construct
  source 1..20: mol_type = other RNA
cttttatacaatctgtgttc

SEQ ID NO: 3513 - RNA, 20 nt, synthetic construct
  source 1..20: mol_type = other RNA
aatctgtgttctggcacctg

SEQ ID NO: 3514 - RNA, 20 nt, synthetic construct
  source 1..20: mol_type = other RNA
aaaaggctgggggctggtgg

SEQ ID NO: 3515 - RNA, 20 nt, synthetic construct
  source 1..20: mol_type = other RNA
agaacacagattgtataaaa

SEQ ID NO: 3516 - RNA, 20 nt, synthetic construct
  source 1..20: mol_type = other RNA
atctgtgttctggcacctgc

SEQ ID NO: 3517 - RNA, 21 nt, synthetic construct
  source 1..21: mol_type = other RNA
agattgtataaaaggctgggg

SEQ ID NO: 3518 - RNA, 21 nt, synthetic construct
  source 1..21: mol_type = other RNA
ccaccagcccccagcctttta

SEQ ID NO: 3519 - RNA, 20 nt, synthetic construct
  source 1..20: mol_type = other RNA
tgctccccatggcgttggaa

SEQ ID NO: 3520 - RNA, 20 nt, synthetic construct
  source 1..20: mol_type = other RNA
ttgctccccatggcgttgga

SEQ ID NO: 3521 - RNA, 20 nt, synthetic construct
  source 1..20: mol_type = other RNA
gagattgctccccatggcgt

SEQ ID NO: 3522 - RNA, 20 nt, synthetic construct
  source 1..20: mol_type = other RNA
ccccatggcgttggaaggca

SEQ ID NO: 3523 - RNA, 20 nt, synthetic construct
  source 1..20: mol_type = other RNA
ccatggcgttggaaggcagg

SEQ ID NO: 3524 - RNA, 20 nt, synthetic construct
  source 1..20: mol_type = other RNA
agattgctccccatggcgtt

SEQ ID NO: 3525 - RNA, 20 nt, synthetic construct
  source 1..20: mol_type = other RNA
cctcagatgtctatgtgttt

SEQ ID NO: 3526 - RNA, 20 nt, synthetic construct
  source 1..20: mol_type = other RNA
tctcacctctgcaagtattg

SEQ ID NO: 3527 - RNA, 20 nt, synthetic construct
  source 1..20: mol_type = other RNA
gcttacaatgactgagatct

SEQ ID NO: 3528 - RNA, 21 nt, synthetic construct
  source 1..21: mol_type = other RNA
tgcttacaatgactgagatct

SEQ ID NO: 3529 - DNA, 23 bp, synthetic construct
  source 1..23: mol_type = other DNA
cctcagatgtctatgtgtttggg

SEQ ID NO: 3530 - DNA, 23 bp, synthetic construct
  source 1..23: mol_type = other DNA
tctcacctctgcaagtattgggg

SEQ ID NO: 3531 - protein, 7 aa, synthetic construct
RSVGSVY

SEQ ID NO: 3532 - protein, 7 aa, synthetic construct
KTVGTVY

SEQ ID NO: 3533 - protein, 7 aa, synthetic construct
RYLGDAS

SEQ ID NO: 3534 - protein, 7 aa, synthetic construct
WVLPSGG

SEQ ID NO: 3535 - protein, 7 aa, synthetic construct
VTVGSIY

SEQ ID NO: 3536 - protein, 7 aa, synthetic construct
VRGSSIL

SEQ ID NO: 3537 - protein, 7 aa, synthetic construct
REQQKLW

SEQ ID NO: 3538 - protein, 7 aa, synthetic construct
ASNPGRW

SEQ ID NO: 3539 - protein, 7 aa, synthetic construct
SLDKPFK

SEQ ID NO: 3540 - protein, 7 aa, synthetic construct
TLAVPFK

SEQ ID NO: 3541 - protein, 7 aa, synthetic construct
WTLESGH

SEQ ID NO: 3542 - protein, 7 aa, synthetic construct
REQKKLW

SEQ ID NO: 3543 - protein, 7 aa, synthetic construct
PTQGTVR

SEQ ID NO: 3544 - protein, 7 aa, synthetic construct
PTQGTFR

SEQ ID NO: 3545 - protein, 7 aa, synthetic construct
PSQGTLR

SEQ ID NO: 3546 - protein, 7 aa, synthetic construct
NLGAALS

SEQ ID NO: 3547 - protein, 7 aa, synthetic construct
PKPSHGE

SEQ ID NO: 3548 - protein, 7 aa, synthetic construct
PTPGTLR

SEQ ID NO: 3549 - protein, 7 aa, synthetic construct
PTQGTLR

SEQ ID NO: 3550 - protein, 7 aa, synthetic construct
QDGPAVK

SEQ ID NO: 3551 - protein, 7 aa, synthetic construct
PNQGTLR

SEQ ID NO: 3552 - protein, 7 aa, synthetic construct
ESLAGVR

SEQ ID NO: 3553 - protein, 7 aa, synthetic construct
TDALTTK

SEQ ID NO: 3554 - protein, 7 aa, synthetic construct
TDAGDGK

SEQ ID NO: 3555 - protein, 7 aa, synthetic construct
MTGISIV

SEQ ID NO: 3556 - protein, 7 aa, synthetic construct
NGYTEGR

SEQ ID NO: 3557 - protein, 7 aa, synthetic construct
SLVTSST

SEQ ID NO: 3558 - protein, 7 aa, synthetic construct
PTQGTIR

SEQ ID NO: 3559 - protein, 736 aa, Dependoparvovirus sp.
  source 1..736: note = serotype AAV9
MAADGYLPDWLEDNLSEGIREWWALKPGAPQPKANQQHQDNARGLVLPGYKYLGPGNGLDKGEPVNAADAAALEHDKAYDQQLKAGDNPYLKYNHADAEFQERLKEDTSFGGNLGRAVFQAKKRLLEPLGLVEEAAKTAPGKKRPVEQSPQEPDSSAGIGKSGAQPAKKRLNFGQTGDTESVPDPQPIGEPPAAPSGVGSLTMASGGGAPVADNNEGADGVGSSSGNWHCDSQWLGDRVITTSTRTWALPTYNNHLYKQISNSTSGGSSNDNAYFGYSTPWGYFDFNRFHCHFSPRDWQRLINNNWGFRPKRLNFKLFNIQVKEVTDNNGVKTIANNLTSTVQVFTDSDYQLPYVLGSAHEGCLPPFPADVFMIPQYGYLTLNDGSQAVGRSSFYCLEYFPSQMLRTGNNFQFSYEFENVPFHSSYAHSQSLDRLMNPLIDQYLYYLSKTINGSGQNQQTLKFSVAGPSNMAVQGRNYIPGPSYRQQRVSTTVTQNNNSEFAWPGASSWALNGRNSLMNPGPAMASHKEGEDRFFPLSGSLIFGKQGTGRDNVDADKVMITNEEEIKTTNPVATESYGQVATNHQSAQAQAQTGWVQNQGILPGMVWQDRDVYLQGPIWAKIPHTDGNFHPSPLMGGFGMKHPPPQILIKNTPVPADPPTAFNKDKLNSFITQYSTGQVSVEIEWELQKENSKRWNPEIQYTSNYYKSNNVEFAVNTEGVYSEPRPIGTRYLTRNL

SEQ ID NO: 3560 - protein, 98 aa, synthetic construct
CLSYDTEILTVEYGLIPIGEIVEKKIECTVYTIDNNGLIYTQSIEQWHHRGYQELFEYILEDGSTIRATKDHKFMTSERQMLPIEEIFERGWELKQVL

SEQ ID NO: 3561 - protein, 99 aa, synthetic construct
CLSSDTEVITEEYGPIAIGKIVDEGIRCSVYSVDNNGNLYTQPISQWHDRGRQEIYEYYLENGSVIRATKDHKFMTKDGEMLPIDEIFEKGLELKQVLP

SEQ ID NO: 3562 - protein, 99 aa, synthetic construct
CLSYETEVLTVEYGFMPIGKIVEERIRCSVYTVDKNGFIYSQPIAQWHQRGLQEVYEYDLENGSIIRATKEHQFMTNDGQMLAIHEIFTRKLDLLQSQE

SEQ ID NO: 3563 - protein, 35 aa, synthetic construct
MKVISRKSLGTQPVYDICVTHDHNFLMKNGLIASN

SEQ ID NO: 3564 - protein, 36 aa, synthetic construct
MDVKIVSYKFLGSENVYDILERDHNFLIKNGLVASN

SEQ ID NO: 3565 - protein, 36 aa, synthetic construct
MVKIITYKSLGRQKVYDLGLEQDHNFVLANGLVASN

SEQ ID NO: 3566 - protein, 36 aa, synthetic construct
MVKIISRKYLDTQPVYDVGVQKDHNFLISNGSIASN

SEQ ID NO: 3567 - protein, 36 aa, synthetic construct
MVKIATRRSLGTEPVYDIGLQQEHNFLLANGLVASN

SEQ ID NO: 3568 - protein, 1380 aa, synthetic construct
MKKPYSIGLDIGTNSVGWAVITDDYKVPAKKMKVLGNTDRSHIKKNLIGALLFDAGNTAEDRRLKRTARRRYTRRRNRILYLQEIFAEEMNKIDESFFHRLDDSFLVPEDKRGSKYPIFATLQEEKEYHKQFPTIYHLRKQLAESNEKADLRLVYLALAHMIKYRGHFLIDDPKFKVQNNDIQGLFEKFVEEYDNVQETSLSKIKLNVTEILTAKIPKSEKQEQLLKNYPSEKKNTLFGNLIGLALGLTPNFKTNFSLENDAKLQISSESYEEDLGSLLALIGENFIELFSAVKNLSDGILLAGIVSDESPHAPLSTKMVIRFKEHEEDLAALKHFIKANLPEKYDEVFSDDSKNGYAGYVGVDSKVRKRNGKLATEEEFYKYLKDILNNVKGADYFLEKIKREDLLRKQRTFDNGTIPYQVHLEEMKAILQNQGEYYPFLKENKEKIQQILTFRIPYYVGPLARGNRDFAWLTRNSDQAIRPWNFEEVVDKASSAEDFINKMTNYDLYLPEEKVLPKHSLLYETFAVYNELTKVKFIAEGLRDYQFLDSGQKKQIVNQLFKEKRKVTEKDIIHYLHNVDGYDGIELKGIEKQFNASLSTYHDLLKIIKDKEFMDDPKNEEILENIVHTLTIFEDREMIKQRLAQYDSLFDEKVIKALTRRHYTGWGKLSAKLINGICDKQTNKTILDFLIDDDKINRNFMQLINDDGLSFKDIIQKAQVVGKIDDVKQVVQELPGSPAIKKGILQSIKIVDELVKVMGHAPESIVIEMARENQTTARGKKNSQQRYKRIEDALKNLAPGLDSNILKENPTDNIQLQNDRLFLYYLQNGKDMYTGEALDINQLSNYDIDHIVPQAFIKDDSLDNRVLTSSKDNRGKSDNVPSIEVVQKRKAFWQQLLDSKLISERKFNNLTKAERGGLDERDKVGFIKRQLVETRQITKHVAQILDARFNTEVNEKNQKIRKVKIITLKSNLVSNFRKEFGLYKVREINDYHHAHDAYLNAVVAKAILKKYPKLEPEFVYGDYQKYDLKRYISRSKDPKEIEKATEKYFFYSNLLNFFKEEVHYADGTIIKRENIEYSKDTGEIAWNKEKDFATVRKVLSCPQVNIVKKTEVQTGGFSKESILPKRNSDKLIARKKDWDPKKYGGFDSPTVAYSVLVVAKVEKGKSKKLKSVKELVGITIMERSSFEKDPVDFLEAKGYKEVRKDLIIKLPKYSLFELENGRKRMLASAGELQKGNELALPSKYVNFLYLASHYEKLKGSPEDNEQKQLFVEQHKHYLDEIIEQISEFSKRVILADANLDKVLSAYNKHRDKPIREQAENIIHLFTLTNLGAPAAFKYFDTTIDRKRYTSTKEVLDATLIHQSITGLYETRIDLSQLGGD

SEQ ID NO: 3569 - DNA, 4140 bp, synthetic construct
  source 1..4140: mol_type = other DNA
atgaagaagccttattccatcggcttggacatcgggactaactccgtcggatgggctgtgattaccgacgactacaaggttcccgcaaaaaagatgaaagtgctcggcaatacagatcggtcacatattaagaagaacctgattggcgctctgcttttcgatgcaggtaatactgccgaggataggcgcctcaagagaacagcccggcgtagatacactcgcagaaggaaccggattctgtacctgcaagaaatttttgctgaagaaatgaataagatcgatgagtcattcttccaccgactggacgatagtttcctggtacctgaagacaaaaggggatccaagtaccccatttttgccacactccaagaagagaaggagtaccacaagcaatttccgaccatctaccaccttaggaagcagctggcagagtccaacgaaaaggcagacttgcggttagtctacctggctcttgcacacatgataaagtaccggggacatttcttaattgacgaccctaagtttaaagttcagaataacgatattcaaggcctcttcgaaaagtttgttgaggaatatgataacgtacaagaaacctctttgtctaaaattaagctcaatgtgactgagatcctcacagcaaagattcccaaaagcgagaaacaagagcaactcctgaagaactaccctagtgagaaaaagaacaccctttttggcaatctgatcgggctcgccctgggcctgacacctaacttcaaaacaaatttctccctggagaacgacgccaagctgcaaatctcatccgagagttacgaggaagacttaggatctctcctcgcactgattggagaaaacttcattgaactcttctccgccgtgaaaaatctgagtgacggcatccttctggccggaatcgtctctgacgagagtccccacgcgccgctgagcacaaagatggtcatccggttcaaagagcacgaagaagatctcgcggcactcaaacatttcatcaaagccaacttgccagaaaaatacgatgaagtattctccgacgatagcaaaaacggctatgcgggatacgtaggagtcgacagcaaggtgcggaagcgcaatggtaagcttgctacagaagaagaattttacaagtaccttaaagatatcctcaataatgttaagggggccgactacttcctcgaaaagatcaaaagggaggacctgttgaggaaacagcgtacctttgacaacggcacaatcccgtaccaggtgcacctcgaagaaatgaaagccattctgcagaaccagggggaatactatccattcctcaaggaaaacaaggaaaaaatccagcagatccttacgtttaggattccttactatgtgggccctttggcaaggggtaaccgggatttcgcttggctcaccaggaatagtgaccaggccataaggccctggaactttgaagaagtcgtcgacaaggcctcttccgccgaagacttcattaacaaaatgactaactacgatctctacctgccagaggaaaaagtccttccaaaacatagcctgctttacgaaaccttcgccgtatacaacgagcttacaaaagtcaagttcatcgcagagggtctcagggattaccaattccttgactctggccaaaaaaagcagatcgtgaatcaacttttcaaggagaaacgaaaggtgactgaaaaggacatcattcactacctgcacaacgtcgatggatacgacgggattgaactgaagggcatagaaaagcagttcaatgctagtttgtccacgtaccacgatctgcttaaaatcattaaggataaggaattcatggatgaccctaagaacgaagagattttggaaaacatcgtccacaccctgaccattttcgaggatagggagatgataaagcaacggctggcacagtacgactcactttttgacgagaaggtgataaaagcccttacaagaaggcattataccgggtggggcaagctctccgctaagctgatcaatggtatttgcgacaagcagaccaataagactattttggacttcctgattgacgatgataagataaaccgaaactttatgcagctgattaatgatgatggactgagctttaaagatatcattcagaaggcccaggtcgtcggcaagatcgacgacgtcaaacaggtggtgcaggaacttccaggatccccggccattaagaagggaatattacagtccatcaaaattgtggatgagctggtgaaagtcatgggacatgcacctgagtctatcgtcatagagatggctcgtgaaaaccagacgacagcccgaggaaagaagaacagccaacaacggtataaacggatcgaggatgcacttaagaatctggccccggggctggattctaatatcttaaaagaaaatccaaccgataatattcaacttcagaacgaccggctttttctgtattaccttcagaatggaaaagatatgtataccggagaagccctggatataaatcagctgagtaactatgatatcgaccacattgtgcctcaggctttcattaaggatgacagcctggacaatcgcgtactcacatcctccaaggacaacagaggcaagagcgataacgtccctagcatcgaagtggtacaaaagcgtaaggccttctggcagcagctcttagactctaaattgataagcgaacggaaattcaataacctcacaaaggccgagcgtggtggcttggacgagagagacaaggtgggcttcattaaacggcagctcgtggaaaccagacagataaccaagcacgttgcccagatcctcgatgccaggttcaacaccgaagttaacgagaaaaaccaaaagattcggaaagtgaagatcatcactctcaagtctaatttggtgtccaactttagaaaagagtttggactctataaggtccgagagattaatgattatcaccacgctcacgatgcctacctcaacgcagtggtggccaaggccatcctgaaaaaatatcctaagctcgagcctgagttcgtctatggtgactatcagaagtacgacctcaagcgctatattagtaggagcaaggatcctaaagagatcgaaaaggccacagaaaagtacttcttttacagcaacttactcaacttcttcaaagaagaagtccactacgctgatggcaccatcatcaagcgagaaaatatagagtacagtaaggacacaggcgaaatcgcctggaataaagagaaggatttcgctactgtgcgaaaagttctgtcttgcccccaggtgaacattgtgaaaaagactgaggtgcagactggcgggtttagcaaagagagtatcctgccaaagcggaatagcgataagttaattgctcggaaaaaggactgggatccaaagaagtacggcggcttcgattccccaaccgttgcctacagcgtcctcgtcgtcgccaaggtggagaagggtaaaagcaagaagctgaaaagtgtaaaggaactggtcggcattaccattatggagcggagttccttcgaaaaggatccagttgattttttagaagccaaggggtataaggaggtgcgcaaggatttaattattaaactccccaagtacagcctgtttgagctggagaacggaaggaagaggatgctggctagcgccggcgagctccaaaagggcaatgagctcgccctgccaagcaagtacgtgaactttctctatctggctagccactacgagaagctgaagggatcacctgaagacaatgagcagaaacagctgttcgtcgagcagcataaacactacctcgacgaaattattgagcaaattagtgagttctcaaagcgggtaatcctcgcagatgcaaatctggataaagtgttaagcgcgtataataagcaccgggacaaaccaatccgggagcaagccgagaacatcattcatctcttcacactgaccaatcttggggctcctgcagcttttaaatatttcgatacaaccatcgacaggaagcgatatacttctacaaaggaagtgcttgatgcaactctcatccatcaaagcatcacggggctgtatgaaacccggattgacctgagtcagctgggtggggac

SEQ ID NO: 3570 - RNA, 86 nt, synthetic construct
  source 1..86: mol_type = other RNA
gttttagagctgtgttgaaaaacacagcaagttaaaataaggctttgtccgtatccaacttgaaaaagtgagcaccgattcggtgc

SEQ ID NO: 3571 - RNA, 78 nt, synthetic construct
  source 1..78: mol_type = other RNA
gttttagagctggaaacagcaagttaaaataaggctttgtccgtatccaacttgaaaaagtgagcaccgattcggtgc

SEQ ID NO: 3572 - RNA, 76 nt, synthetic construct; identical to SEQ ID NO: 319
  source 1..76: mol_type = other RNA

SEQ ID NO: 3573 - protein, 12 aa, synthetic construct
EGGSEEEEESGS

SEQ ID NO: 3574 - protein, 12 aa, synthetic construct
KGPKPKKEESEK

SEQ ID NO: 3575 - protein, 166 aa, synthetic construct
SEVEFSHEYWMRHALTLAKRARDEREVPVGAVLVLNNRVIGEGWNRAIGLHDPTAHAEIMALRQGGLVMQNYRLIDATLYVTFEPCVMCAGAMIHSRIGRVVFGVRNSKRGAAGSLMNVLNYPGMNHRVEITEGILADECAALLCDFYRMPRQVFNAQKKAQSSIN

SEQ ID NO: 3576 - protein, 166 aa, synthetic construct
SEVEFSHEYWMRHALTLAKRARDEGEVPVGAVLVLNNRVIGEGWNRAIGLYDPTAHAEIMALRQGGLVMQNYRLIDATLYVTFEPCVMCAGAMIHSRIGRVVFGVRNSKRGAAGSLMNVLNYPGMDHRVEITEGILADECAALLCDFYRMPRQVFNAQKKAQSSIN

SEQ ID NO: 3577 - protein, 166 aa, synthetic construct
SEVEFSHEYWMRHALTLAKRARDEGEVPVGAVLVLNNRVIGEGWNRAIGLHDPTAHAEIMALRQGGLVMQNYRLIDATLYVTFEPCVMCAGAMIHSRIGRVVFGVRNSKRGAAGSLMNVLNYPGMDHRVEITEGILADECAALLCDFYRMPRQVFNAQKKAQSSIN

SEQ ID NO: 3578 - protein, 166 aa, synthetic construct
SEVEFSHEYWMRHALTLAKRARDEREVPVGAVLVLNNRVIGEGWNRAIGLHDPTAHAEIMALRQGGLVMQNYGLIDATLYVTFEPCVMCAGAIIHSRIGRVVFGVRNSKRGAAGSLMNVLNYPGMNHRVEITEGILADECAALLCDFYRMPRQVFNAQKKAQSSIN

SEQ ID NO: 3579 - protein, 166 aa, synthetic construct
SEVEFSHEYWMRHALTLAKRARDEREVPVGAVLVLNNRVIGEGWNRAIGLHDPTAHAEIMALRQGGLVMQNYRLIDATLYVTFEPCVMCAGAMIHSRIGRVVFGVRNSKRGAAGSLMNVLNYPGMDHRVEITEGILADECAALLCDFYRMPRQVFNAQKKAQSSIN

SEQ ID NO: 3580 - protein, 166 aa, synthetic construct
SEVEFSHEYWMRHALTLAKRARDEGEVPVGAVLVLNNRVIGEGWNRAIGLYDPTAHAEIMALRQGGLVMQNYGLIDATLYVTFEPCVMCAGAMIHSRIGRVVFGVRNSKRGAAGSLMNVLNYPGMDHRVEITEGILADECAALLCDFYRMPRQVFNAQKKAQSSIN

SEQ ID NO: 3581 - protein, 166 aa, synthetic construct
SEVEFSHEYWMRHALTLAKRARDEGEVPVGAVLVLNNRVIGEGWNRAIGLYDPTAHAEIMALRQGGLVMQNYGLIDATLYSTFEPCVMCAGAMIHSRIGRVVFGVRNSKRGAAGSLMNVLNYPGMDHRVEITEGILADECAALLCDFYRMPRRVFNAQKKAQSSIN

SEQ ID NO: 3582 - protein, 166 aa, synthetic construct
SEVEFSHEYWMRHALTLAKRARDEGEVPVGAVLVLNNRVIGEGWNRAIGLYDPTAHAEIMALRQGGLVMQNYRLIDATLYVTFEPCVMCAGAMIHSRIGRVVFGVRNSKRGAAGSLMNVLNYPGMDHRVEITEGILANECAALLCDFYRMPRQVFNAQKKAQSSIN

SEQ ID NO: 3583 - protein, 166 aa, synthetic construct
SEVEFSHEYWMRHALTLAKRARDEREVPVGAVLVLNNRVIGEGWNRAIGLHDPTAHAEIMALRQGGLVMQNYRLYDATLYSTFEPCVMCAGAMIHSRIGRVVFGVRNAKTGAAGSLMDVLHHPGMNHRVEITEGILADECAALLCRFFRMPRRVFNAQKKAQSSTD

SEQ ID NO: 3584 - protein, 160 aa, Staphylococcus aureus; identical to SEQ ID NO: 309

SEQ ID NO: 3585 - protein, 161 aa, Bacillus subtilis; identical to SEQ ID NO: 310

SEQ ID NO: 3586 - protein, 183 aa, Salmonella enterica; identical to SEQ ID NO: 311
  source 1..183: note = serovar Typhimurium

SEQ ID NO: 3587 - protein, 164 aa, Shewanella putrefaciens; identical to SEQ ID NO: 312

SEQ ID NO: 3588 - protein, 173 aa, Haemophilus influenzae; identical to SEQ ID NO: 313

SEQ ID NO: 3589 - protein, 161 aa, Caulobacter crescentus; identical to SEQ ID NO: 314

SEQ ID NO: 3590 - protein, 178 aa, Geobacter sulfurreducens
MSSLKKTPIRDDAYWMGKAIREAAKAAARDEVPIGAVIVRDGAVIGRGHNLREGSNDPSAHAEMIAIRQAARRSANWRLTGATLYVTLEPCLMCMGAIILARLERVVFGCYDPKGAAGSLYDLSADPRLNHQVRLSPGVCQEECGTMLSDFFRDLRRRKKAKATPALFIDERKVPPEP

SEQ ID NO: 3591 - protein, 171 aa, Streptococcus pyogenes
MPYSLEEQTYFMQEALKEAEKSLQKAEIPIGCVIVKDGEIIGRGHNAREESNQAIMHAEIMAINEANAHEGNWRLLDTTLFVTIEPCVMCSGAIGLARIPHVIYGASNQKFGGADSLYQILTDERLNHRVQVERGLLAADCANIMQTFFRQGRERKKIAKHLIKEQSDPFD

SEQ ID NO: 3592 - protein, 151 aa, Aquifex aeolicus
MGKEYFLKVALREAKRAFEKGEVPVGAIIVKEGEIISKAHNSVEELKDPTAHAEMLAIKEACRRLNTKYLEGCELYVTLEPCIMCSYALVLSRIEKVIFSALDKKHGGVVSVFNILDEPTLNHRVKWEYYPLEEASELLSEFFKKLRNNII

SEQ ID NO: 3593 - protein, 178 aa, Escherichia coli
MRRAFITGVFFLSEVEFSHEYWMRHALTLAKRAWDEREVPVGAVLVHNNRVIGEGWNRPIGRHDPTAHAEIMALRQGGLVMQNYRLIDATLYVTLEPCVMCAGAMIHSRIGRVVFGARDAKTGAAGSLMDVLHHPGMNHRVEITEGILADECAALLSDFFRMRRQEIKAQKKAQSSTD

SEQ ID NO: 3594 - protein, 167 aa, synthetic construct
MSEVEFSHEYWMRHALTLAKRARDEREVPVGAVLVLNNRVIGEGWNRAIGLHDPTAHAEIMALRQGGLVMQNYRLIDATLYVTFEPCVMCAGAMIHSRIGRVVFGVRNSKRGAAGSLMNVLNYPGMNHRVEITEGILADECAALLCDFYRMPRQVFNAQKKAQSSIN

SEQ ID NO: 3595 - protein, 167 aa, synthetic construct
MSEVEFSHEYWMRHALTLAKRARDEGAGPVGAVLVLNNRVIGEGWNRAIGLHDPTAHAEIMALRQGGLVMQNYRLFDATLYVTFEPCVMCAGAMINSRIGRVVFGVRNSKRGAAGSLMNVLNYPGMNHRVEITEGILADECAALLCDFYRMPRQVFNSQKKAQSSIN

SEQ ID NO: 3596 - protein, 167 aa, synthetic construct
MSEVEFSHEYWMRHALTLAKRARDEGAGPVGAVLVLNNRVIGEGWNRAIGLHDPTAHAEIMALRQGGLVMQNYRLFDATLYVTFEPCVMCAGAMINSRIGRVVFGVRNSKRGAAGSLMNVLNYPGMNHRVEITEGILADECAALLCDFYRMPRRVFNSQKKAQSSIN

SEQ ID NO: 3597 - protein, 167 aa, synthetic construct
MSEVEFSHEYWMRHALTLAKRARDEGAGPVGAVLVLNNRVIGEGWNRAIGLHDPTAHAEIMALRQGGLVMQNYRLFDATLYVTFEPCVMCAGAMINSRIGRVVFGVRNSKRGAAGSLMNVLNYPGMNHRVEITEGILADECAALLCDFYRIPRQVFNSQKKAQSSIN

SEQ ID NO: 3598 - protein, 167 aa, synthetic construct
MSEVEFSHEYWMRHALTLAKRARDERKAPVGAVLVLNNRVIGEGWNRAIGLHDPTAHAEIIALRQGGLVMQNYRLIDATLYVTFEPCVMCAGAMINSRIGRVVFGVRNSKRGAAGSLMNVLNYPGMNHRVEITEGILADECAALLCDFYRMPRQVFNAQKKAQSSIN

SEQ ID NO: 3599 - protein, 167 aa, synthetic construct
MSEVEFSHEYWMRHALTLAKRARDERAGPVGAVLVLNNRVIGEGWNRAIGLHDPTAHAEIMALRQGGLVMQNHRLIDATLYVTFEPCVMCAGAMINSRIGRVVFGVRNSKRGAAGSLMNVLNYPGMNHRVEITEGILADECAALLCDFYRMPRHVFNSQKKAQSSIN

SEQ ID NO: 3600 - protein, 167 aa, synthetic construct
MSEVEFSHEYWMRHALTLAKRARDEGEAPVGAVLVLNNRVIGEGWNRRIGLHDPTAHAEIMALRQGGLVMQNSRLIDATLYVTFEPCVMCAGAMINSRIGRVVFGVRNSKRGAAGSLMNVLNYPGMNHRVEITEGILADECAALLCDFYRMPRQVFNAQKKAQSSIN

SEQ ID NO: 3601 - protein, 167 aa, synthetic construct
MSEVEFSHEYWMRHALTLAKRARDEGEGPVGAVLVLNNRVIGEGWNRRIGLHDPTAHAEIMALRQGGLVMQNCRLIDATLYVTFEPCVMCAGAMIHSRIGRVVFGVRNSKRGAAGSLMNVLNYPGMNHRVEITEGILADECAALLCDFYRMPRQVFNAQKKAQSSIN

SEQ ID NO: 3602 - protein, 167 aa, synthetic construct
MSEVEFSHEYWMRHALTLAKRARDEGEAPVGAVLVLNNRVIGEGWIRRIGLHDPTAHAEIMALRQGGLVMQNPRLIDATLYVTFEPCVMCAGAMINSRIGRVVFGVRNSKRGAAGSLMNVLNYPGMNHRVEITEGILADECAALLCDFYRMPRQVFNAQKKAQSSIN

SEQ ID NO: 3603 - protein, 167 aa, synthetic construct
MSEVEFSHEYWMRHALTLAKRARDEGEAPVGAVLVLNNRVIGEGWTRRIGLHDPTAHAEIMALRQGGLVMQNSRLIDATLYVTFEPCVMCAGAMINSRIGRVVFGVRNSKRGAAGSLMNVLNYPGMNHRVEITEGILADECAALLCDFYRMPRHVFNAQKKAQSSIN

SEQ ID NO: 3604 - protein, 167 aa, synthetic construct
MSEVEFSHEYWMRHALTLAKRARDEGEAPVGAVLVLNNRVIGEGWTRRIGLHDPTAHAEIMALRQGGLVMQNSRLIDATLYVTFEPCVMCAGAMINSRIGRVVFGVRNSKRGAAGSLMNVLNYPGMNHRVEITEGILADECAALLCDFYRMPRQVFNAQKKAQSSIN

SEQ ID NO: 3605 - protein, 167 aa, synthetic construct
MSEVEFSHEYWMRHALTLAKRARDEGEAPVGAVLVLNNRVIGEGWVRRIGLHDPTAHAEIMALRQGGLVMQNSRLIDATLYVTFEPCVMCAGAMINSRIGRVVFGVRNSKRGAAGSLMNVLNYPGMNHRVEITEGILADECAALLCDFYRMPRQVFNAQKKAQSSIN

SEQ ID NO: 3606 - protein, 167 aa, synthetic construct
MSEVEFSHEYWMRHALTLAKRARDEGEAPVGAVLVLNNRVIGEGWVRRIGLHDPTAHAEIMALRQGGLVMQNPRLIDATLYVTFEPCVMCAGAMINSRIGRVVFSVRNSKRGAAGSLMNVLNYPGMNHRVEITEGILADECAALLCDFYRMPRQVFNAQKKAQSSIN

SEQ ID NO: 3607 - protein, 167 aa, synthetic construct
MSEVEFSHEYWMRHALTLAKRARDEGEAPVGAVLVLNNRVIGEGWLRRIGLHDPTAHAEIMALRQGGLVMQNPRLIDATLYVTFEPCVMCAGAMINSRIGRVVFGVRNSKRGAAGSLMNVLNYPGMNHRVEITEGILADECAALLCDFYRMPRQVFNAQKKAQSSIN

SEQ ID NO: 3608 - protein, 167 aa, synthetic construct
MSEVEFSHEYWMRHALTLAKRARDEREAPVGAVLVLNNRVIGEGWLRPIGLHDPTAHAEIMALRQGGLVMQNPRLIDATLYVTFEPCVMCAGAMIHSRIGRVVFGVRNSKRGAAGSLMNVLNYPGMNHRVEITEGILADECAALLCDFYRMPRQVFNAQKKAQSSIN

SEQ ID NO: 3609 - protein, 167 aa, synthetic construct
MSEVEFSHEYWMRHALTLAKRARDEGEAPVGAVLVLNNRVIGEGWCRRIGLHDPTAHAEIMALRQGGLVMQNSRLIDATLYVTFEPCVMCAGAMIHSRIGRVVFGVRNSKRGAAGSLMNVLNYPGMNHRVEITEGILADECAALLCDFYRMPRQVFNAQKKAQSSIN

SEQ ID NO: 3610 - protein, 167 aa, synthetic construct
MSEVEFSHEYWMRHALTLAKRARDEGEAPVGAVLVLNNRVIGEGWVRRIGLHDPTAHAEIMALRQGGLVMQNPRLIDATLYVTFEPCVMCAGAMINSRIGRVVFGVRNSKRGAAGSLMNVLNYPGMNHRVEITEGILADECAALLCDFYRMPRQVFNAQKKAQSSIN

SEQ ID NO: 3611 - protein, 167 aa, synthetic construct
MSEVEFSHEYWMRHALTLAKRARDEGEAPVGAVLVLNNRVIGEGWVRRIGLHDPTAHAEIMALRQGGLVMHNPRLIDATLYVTFEPCVMCAGAMINSRIGRVVFGVRNSKRGAAGSLMNVLNYPGMNHRVEITEGILADECAALLCDFYRMPRQVFNAQKKAQSSIN

SEQ ID NO: 3612 - protein, 167 aa, synthetic construct
MSEVEFSHEYWMRHALTLAKRARDEGEAPVGAVLVLNNRVIGEGWLRRIGLHDPTAHAEIMALRQGGLVMQNSRLIDATLYVTFEPCVMCAGAMINSRIGRVVFGVRNSKRGAAGSLMNVLNYPGMNHRVEITEGILADECAALLCDFYRMPRQVFNAQKKAQSSIN

SEQ ID NO: 3613 - protein, 167 aa, synthetic construct
MSEVEFSHEYWMRHALTLAKRARDEGEAPVGAVLVLNNRVIGEGWCRRIGLHDPTAHAEIMALRQGGLVMQNPRLIDATLYVTFEPCVMCAGAMINSRIGRVVFGVRNSKRGAAGSLMNVLNYPGMNHRVEITEGILADECAALLCDFYRMPRQVFNAQKKAQSSIN

SEQ ID NO: 3614 - protein, 167 aa, synthetic construct
MSEVEFSHEYWMRHALTLAKRARDEGEAPVGAVLVLNNRVIGEGWCRRIGLHDPTAHAEIMALRQGGLVMQNPRLIDATLYVTFEPCVMCAGAMINSRIGRVVFGVRNSKRGAAGSLMNVLNYPGMNHRVEITEGILADECAALLCDFYRMPRQVFNAQKKVQSSIN

SEQ ID NO: 3615 - protein, 167 aa, synthetic construct
MSEVEFSHEYWMRHALTLAKRARDEGEAPVGAVLVLNNRVIGEGWIRRIGLHDPTAHAEIMALRQGGLVMQNSRLIDATLYVTFEPCVMCAGAMINSRIGRVVFGVRNSKRGAAGSLMNVLNYPGMNHRVEITEGILADECAALLCDFYRMPRQVFNAQKKAQSSIN

SEQ ID NO: 3616 - protein, 167 aa, synthetic construct
MSEVEFSHEYWMRHALTLAKRARDEGEAPVGAVLVLNNRVIGEGWNRRIGLHDPTAHAEIMALRQGGLVMSNSRLIDATLYVTFEPCVMCAGAMINSRIGRVVFGVRNSKRGAAGSLMNVLNYPGMNHRVEITEGILADECAALLCDFYRMPRQVFNAQKKAQSSIN

SEQ ID NO: 3617 - protein, 167 aa, synthetic construct
MSEVEFSHEYWMRHALTLAKRARDEGEAPVGAVLVLNNRVIGEGWLRRIGLHDPTAHAEIMALRQGGLVMQNPRLIDATLYVTFEPCVMCAGAMIHSRIGRVVFGVRNSKRGAAGSLMNVLNYPGMNHRVEITEGILADECAALLCDFYRMPRQVFNAQKKAQSSIN

SEQ ID NO: 3618 - protein, 167 aa, synthetic construct; identical to SEQ ID NO: 3607

SEQ ID NO: 3619 - protein, 167 aa, synthetic construct
MSEVEFSHEYWMRHALTLAKRARDEGEAPVGAVLVLNNRVIGEGWNRAIGLHDPTAHAEIMALRQGGLVMQNPRLIDATLYVTFEPCVMCAGAMINSRIGRVVFGVRNSKRGAAGSLMNVLNYPGMNHRVEITEGILADECAALLCDFYRMPRQVFNAQKKAQSSIN

SEQ ID NO: 3620 - protein, 167 aa, synthetic construct; identical to SEQ ID NO: 3605

SEQ ID NO: 3621 - protein, 167 aa, synthetic construct; identical to SEQ ID NO: 3610

SEQ ID NO: 3622 - protein, 167 aa, synthetic construct
MSEVEFSHEYWMRHALTLAKRARDEGEVPVGAVLVLNNRVIGEGWLRAIGLHDPTAHAEIMALRQGGLVMQNYRLIDATLYVTFEPCVMCAGAMIHSRIGRVVFGVRNSKRGAAGSLMNVLNYPGMNHRVEITEGILADECAALLCDFYRMPRQVFNAQKKAQSSIN

SEQ ID NO: 3623 - protein, 167 aa, synthetic construct; identical to SEQ ID NO: 3602

SEQ ID NO: 3624 - protein, 167 aa, synthetic construct; identical to SEQ ID NO: 3606

SEQ ID NO: 3625 - protein, 167 aa, synthetic construct
MSEVEFSHEYWMRHALTLAKRARDEGEAPVGAVLVLNNRVIGEGWNRPIGLHDPTAHAEIMALRQGGLVMQNHRLIDAPLYVTFEPCVMCAGAMINSRIGRVVFGVRNSKRGAAGSLMNVLNYPGMNHRVEITEGILADECAALLCDFYRMPRQVFNAQKKAQSSIN

SEQ ID NO: 3626 - protein, 167 aa, synthetic construct
MSEVEFSHEYWMRHALTLAKRARDEGEVPVGAVLVLNNRVIGEGWIRAIGLHDPTAHAEIMALRQGGLVMQNYRLIDATLYVTFEPCVMCAGAMINSRIGRVVFGVRNSKRGAAGSLMNVLNYPGMNHRVEITEGILADECAALLCDFYRMPRQVFNAQKKAQSSIN

SEQ ID NO: 3627 - protein, 167 aa, synthetic construct; identical to SEQ ID NO: 3610

SEQ ID NO: 3628 - protein, 167 aa, synthetic construct; identical to SEQ ID NO: 3612

SEQ ID NO: 3629 - protein, 167 aa, synthetic construct
MSEVEFSHEYWMRHALTLAKRARDEGEAPVGAVLVLNNRVIGEGWCRRIGLHDPTAHAEIMALRQGGLVMQNYRLIDATLYVTFEPCVMCAGAMINSRIGRVVFGVRNSKRGAAGSLMNVLNYPGMNHRVEITEGILADECAALLCDFYRMPRQVFNAQKKVQSSIN

SEQ ID NO: 3630 - protein, 167 aa, synthetic construct; identical to SEQ ID NO: 3611

SEQ ID NO: 3631 - protein, 167 aa, synthetic construct; identical to SEQ ID NO: 3613

SEQ ID NO: 3632 - protein, 167 aa, synthetic construct; identical to SEQ ID NO: 3614

SEQ ID NO: 3633 - protein, 167 aa, synthetic construct; identical to SEQ ID NO: 3610

SEQ ID NO: 3634 - protein, 167 aa, synthetic construct; identical to SEQ ID NO: 3605

SEQ ID NO: 3635 - protein, 167 aa, synthetic construct
MSEVEFSHEYWMRHALTLAKRARDEGEAPVGAVLVLNNRVIGEGWVRPIGLHDPTAHAEIMALRQGGLVMQNSRLIDATLYVTFEPCVMCAGAMINSRIGRVVFGVRNSKRGAAGSLMNVLNYPGMNHRVEITEGILADECAALLCDFYRMPRQVFNAQKKAQSSIN

SEQ ID NO: 3636 - protein, 167 aa, synthetic construct; identical to SEQ ID NO: 3613

SEQ ID NO: 3637 - protein, 167 aa, synthetic construct
MSEVEFSHEYWMRHALTLAKRARDEGEAPVGAVMVLNNRVIGEGWLRRIGLHDPTAHAEIMALRQGGLVMQNPRLIDATLYVTFEPCVMCAGAMINSRIGRVVFGVRNSKRGAAGSLMNVLNYPGMNHRVEITEGILADECAALLCDFYRMPRQVFNAQKKAQSSIN

SEQ ID NO: 3638 - protein, 167 aa, synthetic construct; identical to SEQ ID NO: 3607

SEQ ID NO: 3639 - protein, 167 aa, synthetic construct
MSEVEFSHEYWMRHALTLAKRARDEGEAPVGAVLVLNNRVIGEGWLRPIGLHDPTAHAEIMALKQGGLVMQNPRLIDATLYVTFEPCVMCAGAMINSRIGRVVFGVRNSKRGAAGSLMNVLNYPGMNHRVEITEGILADECAALLCDFYRMPRQVFNAQKKAQSSIN

SEQ ID NO: 3640 - protein, 1699 aa, synthetic construct
MKRTADGSEFESPKKKRKVSSEVEFSHEYWMRHALTLAKRARDEGAGPVGAVLVLNNRVIGEGWNRAIGLHDPTAHAEIMALRQGGLVMQNYRLFDATLYVTFEPCVMCAGAMINSRIGRVVFGVRNSKRGAAGSLMNVLNYPGMNHRVEITEGILADECAALLCDFYRMPRQVFNSQKKAQSSINSGGSSGGSSGSETPGTSESATPESSGGSSGGSDKKYSIGLAIGTNSVGWAVITDEYKVPSKKFKVLGNTDRHSIKKNLIGALLFDSGETAEATRLKRTARRRYTRRKNRICYLQEIFSNEMAKVDDSFFHRLEESFLVEEDKKHERHPIFGNIVDEVAYHEKYPTIYHLRKKLVDSTDKADLRLIYLALAHMIKFRGHFLIEGDLNPDNSDVDKLFIQLVQTYNQLFEENPINASGVDAKAILSARLSKSRRLENLIAQLPGEKKNGLFGNLIALSLGLTPNFKSNFDLAEDAKLQLSKDTYDDDLDNLLAQIGDQYADLFLAAKNLSDAILLSDILRVNTEITKAPLSASMIKRYDEHHQDLTLLKALVRQQLPEKYKEIFFDQSKNGYAGYIDGGASQEEFYKFIKPILEKMDGTEELLVKLNREDLLRKQRTFDNGSIPHQIHLGELHAILRRQEDFYPFLKDNREKIEKILTFRIPYYVGPLARGNSRFAWMTRKSEETITPWNFEEVVDKGASAQSFIERMTNFDKNLPNEKVLPKHSLLYEYFTVYNELTKVKYVTEGMRKPAFLSGEQKKAIVDLLFKTNRKVTVKQLKEDYFKKIECFDSVEISGVEDRFNASLGTYHDLLKIIKDKDFLDNEENEDILEDIVLTLTLFEDREMIEERLKTYAHLFDDKVMKQLKRRRYTGWGRLSRKLINGIRDKQSGKTILDFLKSDGFANRNFMQLIHDDSLTFKEDIQKAQVSGQGDSLHEHIANLAGSPAIKKGILQTVKVVDELVKVMGRHKPENIVIEMARENQTTQKGQKNSRERMKRIEEGIKELGSQILKEHPVENTQLQNEKLYLYYLQNGRDMYVDQELDINRLSDYDVDHIVPQSFLKDDSIDNKVLTRSDKNRGKSDNVPSEEVVKKMKNYWRQLLNAKLITQRKFDNLTKAERGGLSELDKAGFIKRQLVETRQITKHVAQILDSRMNTKYDENDKLIREVKVITLKSKLVSDFRKDFQFYKVREINNYHHAHDAYLNAVVGTALIKKYPKLESEFVYGDYKVYDVRKMIAKSEQEIGKATAKYFFYSNIMNFFKTEITLANGEIRKRPLIETNGETGEIVWDKGRDFATVRKVLSMPQVNIVKKTEVQTGGFSKESILPKRNSDKLIARKKDWDPKKYGGFDSPTVAYSVLVVAKVEKGKSKKLKSVKELLGITIMERSSFEKNPIDFLEAKGYKEVKKDLIIKLPKYSLFELENGRKRMLASAGELQKGNELALPSKYVNFLYLASHYEKLKGSPEDNEQKQLFVEQHKHYLDEIIEQISEFSKRVILADANLDKVLSAYNKHRDKPIREQAENIIHLFTLTNLGAPAAFKYFDTTIDRKRYTSTKEVLDATLIHQSITGLYETRIDLSQLGGDSGGSGGSGGSTNLSDIIEKETGKQLVIQESILMLPEEVEEVIGNKPESDILVHTAYDESTDENVMLLTSDAPEYKPWALVIQDSNGENKIKMLSGGSKRTADGSEFEPKKKRKV

SEQ ID NO: 3641 - protein, 1699 aa, synthetic construct
MKRTADGSEFESPKKKRKVSSEVEFSHEYWMRHALTLAKRARDEGAGPVGAVLVLNNRVIGEGWNRAIGLHDPTAHAEIMALRQGGLVMQNYRLFDATLYVTFEPCVMCAGAMINSRIGRVVFGVRNSKRGAAGSLMNVLNYPGMNHRVEITEGILADECAALLCDFYRMPRRVFNSQKKAQSSINSGGSSGGSSGSETPGTSESATPESSGGSSGGSDKKYSIGLAIGTNSVGWAVITDEYKVPSKKFKVLGNTDRHSIKKNLIGALLFDSGETAEATRLKRTARRRYTRRKNRICYLQEIFSNEMAKVDDSFFHRLEESFLVEEDKKHERHPIFGNIVDEVAYHEKYPTIYHLRKKLVDSTDKADLRLIYLALAHMIKFRGHFLIEGDLNPDNSDVDKLFIQLVQTYNQLFEENPINASGVDAKAILSARLSKSRRLENLIAQLPGEKKNGLFGNLIALSLGLTPNFKSNFDLAEDAKLQLSKDTYDDDLDNLLAQIGDQYADLFLAAKNLSDAILLSDILRVNTEITKAPLSASMIKRYDEHHQDLTLLKALVRQQLPEKYKEIFFDQSKNGYAGYIDGGASQEEFYKFIKPILEKMDGTEELLVKLNREDLLRKQRTFDNGSIPHQIHLGELHAILRRQEDFYPFLKDNREKIEKILTFRIPYYVGPLARGNSRFAWMTRKSEETITPWNFEEVVDKGASAQSFIERMTNFDKNLPNEKVLPKHSLLYEYFTVYNELTKVKYVTEGMRKPAFLSGEQKKAIVDLLFKTNRKVTVKQLKEDYFKKIECFDSVEISGVEDRFNASLGTYHDLLKIIKDKDFLDNEENEDILEDIVLTLTLFEDREMIEERLKTYAHLFDDKVMKQLKRRRYTGWGRLSRKLINGIRDKQSGKTILDFLKSDGFANRNFMQLIHDDSLTFKEDIQKAQVSGQGDSLHEHIANLAGSPAIKKGILQTVKVVDELVKVMGRHKPENIVIEMARENQTTQKGQKNSRERMKRIEEGIKELGSQILKEHPVENTQLQNEKLYLYYLQNGRDMYVDQELDINRLSDYDVDHIVPQSFLKDDSIDNKVLTRSDKNRGKSDNVPSEEVVKKMKNYWRQLLNAKLITQRKFDNLTKAERGGLSELDKAGFIKRQLVETRQITKHVAQILDSRMNTKYDENDKLIREVKVITLKSKLVSDFRKDFQFYKVREINNYHHAHDAYLNAVVGTALIKKYPKLESEFVYGDYKVYDVRKMIAKSEQEIGKATAKYFFYSNIMNFFKTEITLANGEIRKRPLIETNGETGEIVWDKGRDFATVRKVLSMPQVNIVKKTEVQTGGFSKESILPKRNSDKLIARKKDWDPKKYGGFDSPTVAYSVLVVAKVEKGKSKKLKSVKELLGITIMERSSFEKNPIDFLEAKGYKEVKKDLIIKLPKYSLFELENGRKRMLASAGELQKGNELALPSKYVNFLYLASHYEKLKGSPEDNEQKQLFVEQHKHYLDEIIEQISEFSKRVILADANLDKVLSAYNKHRDKPIREQAENIIHLFTLTNLGAPAAFKYFDTTIDRKRYTSTKEVLDATLIHQSITGLYETRIDLSQLGGDSGGSGGSGGSTNLSDIIEKETGKQLVIQESILMLPEEVEEVIGNKPESDILVHTAYDESTDENVMLLTSDAPEYKPWALVIQDSNGENKIKMLSGGSKRTADGSEFEPKKKRKV

SEQ ID NO: 3642 - protein, 1699 aa, synthetic construct
MKRTADGSEFESPKKKRKVSSEVEFSHEYWMRHALTLAKRARDEGAGPVGAVLVLNNRVIGEGWNRAIGLHDPTAHAEIMALRQGGLVMQNYRLFDATLYVTFEPCVMCAGAMINSRIGRVVFGVRNSKRGAAGSLMNVLNYPGMNHRVEITEGILADECAALLCDFYRIPRQVFNSQKKAQSSINSGGSSGGSSGSETPGTSESATPESSGGSSGGSDKKYSIGLAIGTNSVGWAVITDEYKVPSKKFKVLGNTDRHSIKKNLIGALLFDSGETAEATRLKRTARRRYTRRKNRICYLQEIFSNEMAKVDDSFFHRLEESFLVEEDKKHERHPIFGNIVDEVAYHEKYPTIYHLRKKLVDSTDKADLRLIYLALAHMIKFRGHFLIEGDLNPDNSDVDKLFIQLVQTYNQLFEENPINASGVDAKAILSARLSKSRRLENLIAQLPGEKKNGLFGNLIALSLGLTPNFKSNFDLAEDAKLQLSKDTYDDDLDNLLAQIGDQYADLFLAAKNLSDAILLSDILRVNTEITKAPLSASMIKRYDEHHQDLTLLKALVRQQLPEKYKEIFFDQSKNGYAGYIDGGASQEEFYKFIKPILEKMDGTEELLVKLNREDLLRKQRTFDNGSIPHQIHLGELHAILRRQEDFYPFLKDNREKIEKILTFRIPYYVGPLARGNSRFAWMTRKSEETITPWNFEEVVDKGASAQSFIERMTNFDKNLPNEKVLPKHSLLYEYFTVYNELTKVKYVTEGMRKPAFLSGEQKKAIVDLLFKTNRKVTVKQLKEDYFKKIECFDSVEISGVEDRFNASLGTYHDLLKIIKDKDFLDNEENEDILEDIVLTLTLFEDREMIEERLKTYAHLFDDKVMKQLKRRRYTGWGRLSRKLINGIRDKQSGKTILDFLKSDGFANRNFMQLIHDDSLTFKEDIQKAQVSGQGDSLHEHIANLAGSPAIKKGILQTVKVVDELVKVMGRHKPENIVIEMARENQTTQKGQKNSRERMKRIEEGIKELGSQILKEHPVENTQLQNEKLYLYYLQNGRDMYVDQELDINRLSDYDVDHIVPQSFLKDDSIDNKVLTRSDKNRGKSDNVPSEEVVKKMKNYWRQLLNAKLITQRKFDNLTKAERGGLSELDKAGFIKRQLVETRQITKHVAQILDSRMNTKYDENDKLIREVKVITLKSKLVSDFRKDFQFYKVREINNYHHAHDAYLNAVVGTALIKKYPKLESEFVYGDYKVYDVRKMIAKSEQEIGKATAKYFFYSNIMNFFKTEITLANGEIRKRPLIETNGETGEIVWDKGRDFATVRKVLSMPQVNIVKKTEVQTGGFSKESILPKRNSDKLIARKKDWDPKKYGGFDSPTVAYSVLVVAKVEKGKSKKLKSVKELLGITIMERSSFEKNPIDFLEAKGYKEVKKDLIIKLPKYSLFELENGRKRMLASAGELQKGNELALPSKYVNFLYLASHYEKLKGSPEDNEQKQLFVEQHKHYLDEIIEQISEFSKRVILADANLDKVLSAYNKHRDKPIREQAENIIHLFTLTNLGAPAAFKYFDTTIDRKRYTSTKEVLDATLIHQSITGLYETRIDLSQLGGDSGGSGGSGGSTNLSDIIEKETGKQLVIQESILMLPEEVEEVIGNKPESDILVHTAYDESTDENVMLLTSDAPEYKPWALVIQDSNGENKIKMLSGGSKRTADGSEFEPKKKRKV

SEQ ID NO: 3643 - protein, 1699 aa, synthetic construct
MKRTADGSEFESPKKKRKVSSEVEFSHEYWMRHALTLAKRARDERKAPVGAVLVLNNRVIGEGWNRAIGLHDPTAHAEIIALRQGGLVMQNYRLIDATLYVTFEPCVMCAGAMINSRIGRVVFGVRNSKRGAAGSLMNVLNYPGMNHRVEITEGILADECAALLCDFYRMPRQVFNAQKKAQSSINSGGSSGGSSGSETPGTSESATPESSGGSSGGSDKKYSIGLAIGTNSVGWAVITDEYKVPSKKFKVLGNTDRHSIKKNLIGALLFDSGETAEATRLKRTARRRYTRRKNRICYLQEIFSNEMAKVDDSFFHRLEESFLVEEDKKHERHPIFGNIVDEVAYHEKYPTIYHLRKKLVDSTDKADLRLIYLALAHMIKFRGHFLIEGDLNPDNSDVDKLFIQLVQTYNQLFEENPINASGVDAKAILSARLSKSRRLENLIAQLPGEKKNGLFGNLIALSLGLTPNFKSNFDLAEDAKLQLSKDTYDDDLDNLLAQIGDQYADLFLAAKNLSDAILLSDILRVNTEITKAPLSASMIKRYDEHHQDLTLLKALVRQQLPEKYKEIFFDQSKNGYAGYIDGGASQEEFYKFIKPILEKMDGTEELLVKLNREDLLRKQRTFDNGSIPHQIHLGELHAILRRQEDFYPFLKDNREKIEKILTFRIPYYVGPLARGNSRFAWMTRKSEETITPWNFEEVVDKGASAQSFIERMTNFDKNLPNEKVLPKHSLLYEYFTVYNELTKVKYVTEGMRKPAFLSGEQKKAIVDLLFKTNRKVTVKQLKEDYFKKIECFDSVEISGVEDRFNASLGTYHDLLKIIKDKDFLDNEENEDILEDIVLTLTLFEDREMIEERLKTYAHLFDDKVMKQLKRRRYTGWGRLSRKLINGIRDKQSGKTILDFLKSDGFANRNFMQLIHDDSLTFKEDIQKAQVSGQGDSLHEHIANLAGSPAIKKGILQTVKVVDELVKVMGRHKPENIVIEMARENQTTQKGQKNSRERMKRIEEGIKELGSQILKEHPVENTQLQNEKLYLYYLQNGRDMYVDQELDINRLSDYDVDHIVPQSFLKDDSIDNKVLTRSDKNRGKSDNVPSEEVVKKMKNYWRQLLNAKLITQRKFDNLTKAERGGLSELDKAGFIKRQLVETRQITKHVAQILDSRMNTKYDENDKLIREVKVITLKSKLVSDFRKDFQFYKVREINNYHHAHDAYLNAVVGTALIKKYPKLESEFVYGDYKVYDVRKMIAKSEQEIGKATAKYFFYSNIMNFFKTEITLANGEIRKRPLIETNGETGEIVWDKGRDFATVRKVLSMPQVNIVKKTEVQTGGFSKESILPKRNSDKLIARKKDWDPKKYGGFDSPTVAYSVLVVAKVEKGKSKKLKSVKELLGITIMERSSFEKNPIDFLEAKGYKEVKKDLIIKLPKYSLFELENGRKRMLASAGELQKGNELALPSKYVNFLYLASHYEKLKGSPEDNEQKQLFVEQHKHYLDEIIEQISEFSKRVILADANLDKVLSAYNKHRDKPIREQAENIIHLFTLTNLGAPAAFKYFDTTIDRKRYTSTKEVLDATLIHQSITGLYETRIDLSQLGGDSGGSGGSGGSTNLSDIIEKETGKQLVIQESILMLPEEVEEVIGNKPESDILVHTAYDESTDENVMLLTSDAPEYKPWALVIQDSNGENKIKMLSGGSKRTADGSEFEPKKKRKV

SEQ ID NO: 3644 - protein, 1699 aa, synthetic construct
MKRTADGSEFESPKKKRKVSSEVEFSHEYWMRHALTLAKRARDERAGPVGAVLVLNNRVIGEGWNRAIGLHDPTAHAEIMALRQGGLVMQNHRLIDATLYVTFEPCVMCAGAMINSRIGRVVFGVRNSKRGAAGSLMNVLNYPGMNHRVEITEGILADECAALLCDFYRMPRHVFNSQKKAQSSINSGGSSGGSSGSETPGTSESATPESSGGSSGGSDKKYSIGLAIGTNSVGWAVITDEYKVPSKKFKVLGNTDRHSIKKNLIGALLFDSGETAEATRLKRTARRRYTRRKNRICYLQEIFSNEMAKVDDSFFHRLEESFLVEEDKKHERHPIFGNIVDEVAYHEKYPTIYHLRKKLVDSTDKADLRLIYLALAHMIKFRGHFLIEGDLNPDNSDVDKLFIQLVQTYNQLFEENPINASGVDAKAILSARLSKSRRLENLIAQLPGEKKNGLFGNLIALSLGLTPNFKSNFDLAEDAKLQLSKDTYDDDLDNLLAQIGDQYADLFLAAKNLSDAILLSDILRVNTEITKAPLSASMIKRYDEHHQDLTLLKALVRQQLPEKYKEIFFDQSKNGYAGYIDGGASQEEFYKFIKPILEKMDGTEELLVKLNREDLLRKQRTFDNGSIPHQIHLGELHAILRRQEDFYPFLKDNREKIEKILTFRIPYYVGPLARGNSRFAWMTRKSEETITPWNFEEVVDKGASAQSFIERMTNFDKNLPNEKVLPKHSLLYEYFTVYNELTKVKYVTEGMRKPAFLSGEQKKAIVDLLFKTNRKVTVKQLKEDYFKKIECFDSVEISGVEDRFNASLGTYHDLLKIIKDKDFLDNEENEDILEDIVLTLTLFEDREMIEERLKTYAHLFDDKVMKQLKRRRYTGWGRLSRKLINGIRDKQSGKTILDFLKSDGFANRNFMQLIHDDSLTFKEDIQKAQVSGQGDSLHEHIANLAGSPAIKKGILQTVKVVDELVKVMGRHKPENIVIEMARENQTTQKGQKNSRERMKRIEEGIKELGSQILKEHPVENTQLQNEKLYLYYLQNGRDMYVDQELDINRLSDYDVDHIVPQSFLKDDSIDNKVLTRSDKNRGKSDNVPSEEVVKKMKNYWRQLLNAKLITQRKFDNLTKAERGGLSELDKAGFIKRQLVETRQITKHVAQILDSRMNTKYDENDKLIREVKVITLKSKLVSDFRKDFQFYKVREINNYHHAHDAYLNAVVGTALIKKYPKLESEFVYGDYKVYDVRKMIAKSEQEIGKATAKYFFYSNIMNFFKTEITLANGEIRKRPLIETNGETGEIVWDKGRDFATVRKVLSMPQVNIVKKTEVQTGGFSKESILPKRNSDKLIARKKDWDPKKYGGFDSPTVAYSVLVVAKVEKGKSKKLKSVKELLGITIMERSSFEKNPIDFLEAKGYKEVKKDLIIKLPKYSLFELENGRKRMLASAGELQKGNELALPSKYVNFLYLASHYEKLKGSPEDNEQKQLFVEQHKHYLDEIIEQISEFSKRVILADANLDKVLSAYNKHRDKPIREQAENIIHLFTLTNLGAPAAFKYFDTTIDRKRYTSTKEVLDATLIHQSITGLYETRIDLSQLGGDSGGSGGSGGSTNLSDIIEKETGKQLVIQESILMLPEEVEEVIGNKPESDILVHTAYDESTDENVMLLTSDAPEYKPWALVIQDSNGENKIKMLSGGSKRTADGSEFEPKKKRKV

SEQ ID NO: 3645 - protein, 1699 aa, synthetic construct
MKRTADGSEFESPKKKRKVSSEVEFSHEYWMRHALTLAKRARDEGAGPVGAVLVLNNRVIGEGWNRAIGLHDPTAHAEIMALRQGGLVMQNYRLFDATLYVTFEPCVMCAGAMINSRIGRVVFGWRNSKRGAAGSLMNVLNYPGMNHRVEITEGILADECAALLCDFYRMPRQVFNSQKKAQSSINSGGSSGGSSGSETPGTSESATPESSGGSSGGSDKKYSIGLAIGTNSVGWAVITDEYKVPSKKFKVLGNTDRHSIKKNLIGALLFDSGETAEATRLKRTARRRYTRRKNRICYLQEIFSNEMAKVDDSFFHRLEESFLVEEDKKHERHPIFGNIVDEVAYHEKYPTIYHLRKKLVDSTDKADLRLIYLALAHMIKFRGHFLIEGDLNPDNSDVDKLFIQLVQTYNQLFEENPINASGVDAKAILSARLSKSRRLENLIAQLPGEKKNGLFGNLIALSLGLTPNFKSNFDLAEDAKLQLSKDTYDDDLDNLLAQIGDQYADLFLAAKNLSDAILLSDILRVNTEITKAPLSASMIKRYDEHHQDLTLLKALVRQQLPEKYKEIFFDQSKNGYAGYIDGGASQEEFYKFIKPILEKMDGTEELLVKLNREDLLRKQRTFDNGSIPHQIHLGELHAILRRQEDFYPFLKDNREKIEKILTFRIPYYVGPLARGNSRFAWMTRKSEETITPWNFEEVVDKGASAQSFIERMTNFDKNLPNEKVLPKHSLLYEYFTVYNELTKVKYVTEGMRKPAFLSGEQKKAIVDLLFKTNRKVTVKQLKEDYFKKIECFDSVEISGVEDRFNASLGTYHDLLKIIKDKDFLDNEENEDILEDIVLTLTLFEDREMIEERLKTYAHLFDDKVMKQLKRRRYTGWGRLSRKLINGIRDKQSGKTILDFLKSDGFANRNFMQLIHDDSLTFKEDIQKAQVSGQGDSLHEHIANLAGSPAIKKGILQTVKVVDELVKVMGRHKPENIVIEMARENQTTQKGQKNSRERMKRIEEGIKELGSQILKEHPVENTQLQNEKLYLYYLQNGRDMYVDQELDINRLSDYDVDHIVPQSFLKDDSIDNKVLTRSDKNRGKSDNVPSEEVVKKMKNYWRQLLNAKLITQRKFDNLTKAERGGLSELDKAGFIKRQLVETRQITKHVAQILDSRMNTKYDENDKLIREVKVITLKSKLVSDFRKDFQFYKVREINNYHHAHDAYLNAVVGTALIKKYPKLESEFVYGDYKVYDVRKMIAKSEQEIGKATAKYFFYSNIMNFFKTEITLANGEIRKRPLIETNGETGEIVWDKGRDFATVRKVLSMPQVNIVKKTEVQTGGFSKESILPKRNSDKLIARKKDWDPKKYGGFDSPTVAYSVLVVAKVEKGKSKKLKSVKELLGITIMERSSFEKNPIDFLEAKGYKEVKKDLIIKLPKYSLFELENGRKRMLASAGELQKGNELALPSKYVNFLYLASHYEKLKGSPEDNEQKQLFVEQHKHYLDEIIEQISEFSKRVILADANLDKVLSAYNKHRDKPIREQAENIIHLFTLTNLGAPAAFKYFDTTIDRKRYTSTKEVLDATLIHQSITGLYETRIDLSQLGGDSGGSGGSGGSTNLSDIIEKETGKQLVIQESILMLPEEVEEVIGNKPESDILVHTAYDESTDENVMLLTSDAPEYKPWALVIQDSNGENKIKMLSGGSKRTADGSEFEPKKKRKV

SEQ ID NO: 3646 - protein, 1699 aa, synthetic construct
MKRTADGSEFESPKKKRKVSSEVEFSHEYWMRHALTLAKRARDERKAPVGAVLVLNNRVIGEGWNRAIGLHDPTAHAEIIALRQGGLVMQNYRLIDATLYVTFEPCVMCAGAMINSRIGRVVFGWRNSKRGAAGSLMNVLNYPGMNHRVEITEGILADECAALLCDFYRMPRQVFNAQKKAQSSINSGGSSGGSSGSETPGTSESATPESSGGSSGGSDKKYSIGLAIGTNSVGWAVITDEYKVPSKKFKVLGNTDRHSIKKNLIGALLFDSGETAEATRLKRTARRRYTRRKNRICYLQEIFSNEMAKVDDSFFHRLEESFLVEEDKKHERHPIFGNIVDEVAYHEKYPTIYHLRKKLVDSTDKADLRLIYLALAHMIKFRGHFLIEGDLNPDNSDVDKLFIQLVQTYNQLFEENPINASGVDAKAILSARLSKSRRLENLIAQLPGEKKNGLFGNLIALSLGLTPNFKSNFDLAEDAKLQLSKDTYDDDLDNLLAQIGDQYADLFLAAKNLSDAILLSDILRVNTEITKAPLSASMIKRYDEHHQDLTLLKALVRQQLPEKYKEIFFDQSKNGYAGYIDGGASQEEFYKFIKPILEKMDGTEELLVKLNREDLLRKQRTFDNGSIPHQIHLGELHAILRRQEDFYPFLKDNREKIEKILTFRIPYYVGPLARGNSRFAWMTRKSEETITPWNFEEVVDKGASAQSFIERMTNFDKNLPNEKVLPKHSLLYEYFTVYNELTKVKYVTEGMRKPAFLSGEQKKAIVDLLFKTNRKVTVKQLKEDYFKKIECFDSVEISGVEDRFNASLGTYHDLLKIIKDKDFLDNEENEDILEDIVLTLTLFEDREMIEERLKTYAHLFDDKVMKQLKRRRYTGWGRLSRKLINGIRDKQSGKTILDFLKSDGFANRNFMQLIHDDSLTFKEDIQKAQVSGQGDSLHEHIANLAGSPAIKKGILQTVKVVDELVKVMGRHKPENIVIEMARENQTTQKGQKNSRERMKRIEEGIKELGSQILKEHPVENTQLQNEKLYLYYLQNGRDMYVDQELDINRLSDYDVDHIVPQSFLKDDSIDNKVLTRSDKNRGKSDNVPSEEVVKKMKNYWRQLLNAKLITQRKFDNLTKAERGGLSELDKAGFIKRQLVETRQITKHVAQILDSRMNTKYDENDKLIREVKVITLKSKLVSDFRKDFQFYKVREINNYHHAHDAYLNAVVGTALIKKYPKLESEFVYGDYKVYDVRKMIAKSEQEIGKATAKYFFYSNIMNFFKTEITLANGEIRKRPLIETNGETGEIVWDKGRDFATVRKVLSMPQVNIVKKTEVQTGGFSKESILPKRNSDKLIARKKDWDPKKYGGFDSPTVAYSVLVVAKVEKGKSKKLKSVKELLGITIMERSSFEKNPIDFLEAKGYKEVKKDLIIKLPKYSLFELENGRKRMLASAGELQKGNELALPSKYVNFLYLASHYEKLKGSPEDNEQKQLFVEQHKHYLDEIIEQISEFSKRVILADANLDKVLSAYNKHRDKPIREQAENIIHLFTLTNLGAPAAFKYFDTTIDRKRYTSTKEVLDATLIHQSITGLYETRIDLSQLGGDSGGSGGSGGSTNLSDIIEKETGKQLVIQESILMLPEEVEEVIGNKPESDILVHTAYDESTDENVMLLTSDAPEYKPWALVIQDSNGENKIKMLSGGSKRTADGSEFEPKKKRKV

SEQ ID NO: 3647 - protein, 1699 aa, synthetic construct
MKRTADGSEFESPKKKRKVSSEVEFSHEYWMRHALTLAKRARDEGEAPVGAVLVLNNRVIGEGWNRRIGLHDPTAHAEIMALRQGGLVMQNSRLIDATLYVTFEPCVMCAGAMINSRIGRVVFGVRNSKRGAAGSLMNVLNYPGMNHRVEITEGILADECAALLCDFYRMPRQVFNAQKKAQSSINSGGSSGGSSGSETPGTSESATPESSGGSSGGSDKKYSIGLAIGTNSVGWAVITDEYKVPSKKFKVLGNTDRHSIKKNLIGALLFDSGETAEATRLKRTARRRYTRRKNRICYLQEIFSNEMAKVDDSFFHRLEESFLVEEDKKHERHPIFGNIVDEVAYHEKYPTIYHLRKKLVDSTDKADLRLIYLALAHMIKFRGHFLIEGDLNPDNSDVDKLFIQLVQTYNQLFEENPINASGVDAKAILSARLSKSRRLENLIAQLPGEKKNGLFGNLIALSLGLTPNFKSNFDLAEDAKLQLSKDTYDDDLDNLLAQIGDQYADLFLAAKNLSDAILLSDILRVNTEITKAPLSASMIKRYDEHHQDLTLLKALVRQQLPEKYKEIFFDQSKNGYAGYIDGGASQEEFYKFIKPILEKMDGTEELLVKLNREDLLRKQRTFDNGSIPHQIHLGELHAILRRQEDFYPFLKDNREKIEKILTFRIPYYVGPLARGNSRFAWMTRKSEETITPWNFEEVVDKGASAQSFIERMTNFDKNLPNEKVLPKHSLLYEYFTVYNELTKVKYVTEGMRKPAFLSGEQKKAIVDLLFKTNRKVTVKQLKEDYFKKIECFDSVEISGVEDRFNASLGTYHDLLKIIKDKDFLDNEENEDILEDIVLTLTLFEDREMIEERLKTYAHLFDDKVMKQLKRRRYTGWGRLSRKLINGIRDKQSGKTILDFLKSDGFANRNFMQLIHDDSLTFKEDIQKAQVSGQGDSLHEHIANLAGSPAIKKGILQTVKVVDELVKVMGRHKPENIVIEMARENQTTQKGQKNSRERMKRIEEGIKELGSQILKEHPVENTQLQNEKLYLYYLQNGRDMYVDQELDINRLSDYDVDHIVPQSFLKDDSIDNKVLTRSDKNRGKSDNVPSEEVVKKMKNYWRQLLNAKLITQRKFDNLTKAERGGLSELDKAGFIKRQLVETRQITKHVAQILDSRMNTKYDENDKLIREVKVITLKSKLVSDFRKDFQFYKVREINNYHHAHDAYLNAVVGTALIKKYPKLESEFVYGDYKVYDVRKMIAKSEQEIGKATAKYFFYSNIMNFFKTEITLANGEIRKRPLIETNGETGEIVWDKGRDFATVRKVLSMPQVNIVKKTEVQTGGFSKESILPKRNSDKLIARKKDWDPKKYGGFDSPTVAYSVLVVAKVEKGKSKKLKSVKELLGITIMERSSFEKNPIDFLEAKGYKEVKKDLIIKLPKYSLFELENGRKRMLASAGELQKGNELALPSKYVNFLYLASHYEKLKGSPEDNEQKQLFVEQHKHYLDEIIEQISEFSKRVILADANLDKVLSAYNKHRDKPIREQAENIIHLFTLTNLGAPAAFKYFDTTIDRKRYTSTKEVLDATLIHQSITGLYETRIDLSQLGGDSGGSGGSGGSTNLSDIIEKETGKQLVIQESILMLPEEVEEVIGNKPESDILVHTAYDESTDENVMLLTSDAPEYKPWALVIQDSNGENKIKMLSGGSKRTADGSEFEPKKKRKV

SEQ ID NO: 3648 - protein, 1699 aa, synthetic construct
MKRTADGSEFESPKKKRKVSSEVEFSHEYWMRHALTLAKRARDEGEGPVGAVLVLNNRVIGEGWNRRIGLHDPTAHAEIMALRQGGLVMQNCKLIDATLYVTFEPCVMCAGAMIHSRIGRVVFGVRNSKRGAAGSLMNVLNYPGMNHRVEITEGILADECAALLCDFYRMPRQVFNAQKKAQSSINSGGSSGGSSGSETPGTSESATPESSGGSSGGSDKKYSIGLAIGTNSVGWAVITDEYKVPSKKFKVLGNTDRHSIKKNLIGALLFDSGETAEATRLKRTARRRYTRRKNRICYLQEIFSNEMAKVDDSFFHRLEESFLVEEDKKHERHPIFGNIVDEVAYHEKYPTIYHLRKKLVDSTDKADLRLIYLALAHMIKFRGHFLIEGDLNPDNSDVDKLFIQLVQTYNQLFEENPINASGVDAKAILSARLSKSRRLENLIAQLPGEKKNGLFGNLIALSLGLTPNFKSNFDLAEDAKLQLSKDTYDDDLDNLLAQIGDQYADLFLAAKNLSDAILLSDILRVNTEITKAPLSASMIKRYDEHHQDLTLLKALVRQQLPEKYKEIFFDQSKNGYAGYIDGGASQEEFYKFIKPILEKMDGTEELLVKLNREDLLRKQRTFDNGSIPHQIHLGELHAILRRQEDFYPFLKDNREKIEKILTFRIPYYVGPLARGNSRFAWMTRKSEETITPWNFEEVVDKGASAQSFIERMTNFDKNLPNEKVLPKHSLLYEYFTVYNELTKVKYVTEGMRKPAFLSGEQKKAIVDLLFKTNRKVTVKQLKEDYFKKIECFDSVEISGVEDRFNASLGTYHDLLKIIKDKDFLDNEENEDILEDIVLTLTLFEDREMIEERLKTYAHLFDDKVMKQLKRRRYTGWGRLSRKLINGIRDKQSGKTILDFLKSDGFANRNFMQLIHDDSLTFKEDIQKAQVSGQGDSLHEHIANLAGSPAIKKGILQTVKVVDELVKVMGRHKPENIVIEMARENQTTQKGQKNSRERMKRIEEGIKELGSQILKEHPVENTQLQNEKLYLYYLQNGRDMYVDQELDINRLSDYDVDHIVPQSFLKDDSIDNKVLTRSDKNRGKSDNVPSEEVVKKMKNYWRQLLNAKLITQRKFDNLTKAERGGLSELDKAGFIKRQLVETRQITKHVAQILDSRMNTKYDENDKLIREVKVITLKSKLVSDFRKDFQFYKVREINNYHHAHDAYLNAVVGTALIKKYPKLESEFVYGDYKVYDVRKMIAKSEQEIGKATAKYFFYSNIMNFFKTEITLANGEIRKRPLIETNGETGEIVWDKGRDFATVRKVLSMPQVNIVKKTEVQTGGFSKESILPKRNSDKLIARKKDWDPKKYGGFDSPTVAYSVLVVAKVEKGKSKKLKSVKELLGITIMERSSFEKNPIDFLEAKGYKEVKKDLIIKLPKYSLFELENGRKRMLASAGELQKGNELALPSKYVNFLYLASHYEKLKGSPEDNEQKQLFVEQHKHYLDEIIEQISEFSKRVILADANLDKVLSAYNKHRDKPIREQAENIIHLFTLTNLGAPAAFKYFDTTIDRKRYTSTKEVLDATLIHQSITGLYETRIDLSQLGGDSGGSGGSGGSTNLSDIIEKETGKQLVIQESILMLPEEVEEVIGNKPESDILVHTAYDESTDENVMLLTSDAPEYKPWALVIQDSNGENKIKMLSGGSKRTADGSEFEPKKKRKV

SEQ ID NO: 3649 - protein, 1505 aa, synthetic construct
MKRTADGSEFESPKKKRKVSSEVEFSHEYWMRHALTLAKRARDEGAGPVGAVLVLNNRVIGEGWNRAIGLHDPTAHAEIMALRQGGLVMQNYRLFDATLYVTFEPCVMCAGAMINSRIGRVVFGVRNSKRGAAGSLMNVLNYPGMNHRVEITEGILADECAALLCDFYRMPRQVFNSQKKAQSSINSGGSSGGSSGSETPGTSESATPESSGGSSGGSAAFKPNPINYILGLAIGIASVGWAMVEIDEEGNPIRLIDLGVRVFERAEVPKTGDSLAMARRLARSVRRLTRRRAHRLLRARRLLKREGVLQAADFDENGLITSLPNTPWQLRAAALDRKLTPLEWSAVLLHLIKHRGYLSQRKNEGETAAKELGALLKGVANNAHALQTGDFRTPAELALNKFEKESGHIRNQRGDYSHTFSRKDLQAELILLFEKQKEFGNPHVSGGLKEGIETLLMTQRPALSGDAVQKMLGHCTLEPTEPKAAKNTYTAERFIWLTKLNNLRILEQGSERPLTDTERSTLMDEPYRKSKLTYAQARKLLGLEDTAFFKGLRYGKDNAEASTLMEMKAYHAISRALEKEGLKDKKSPLNLSSELQDEIGTAFSLFKTDEDITGRLKDRVQPEILEALLKHISFDKFVQISLKALRRIVPLMEQGKRYDEACAEIYGVHYGKKNTEEKIYLPPIPADEIRNPVVLRALSQARKVINGVVRRYGSPARIHIETAREVGKSFKDRKEIAKRQEENRKDREKAAAKFREYFPNFVGEPKSKDILKLRLYEQQHGKCLYSGKEINLVRLNEKGYVEIDHALPFSRTWDDSFNNKVLVLGSENQNKGNQTPYEYFNGKDNSREWQEFKARVETSRFPSSKKQRILLQKFDEDGFKECNLNDTRYVNRFLCQFVADHILLTGKGKRRVVASNGQITNLLRGFWRLRKVRAENDRHHALDAVVVACSTVAMQQKITRFVRYKEMNAFDGKTVDKETGKVLYQKTHFPQPWEFFAQEVMIRVFGKPDGKPEFEEADTPEKLRTLLAEKLSSRPEAVHEYVTPLFVSRAPNRKMSGAHKDTLRSAKRFVKHNEKISVKRVWLTEIKLADLENMVNYKNGREIELYEALKARLEAYGGNAKQAFDPKDNPFYKKGGQLVKAVRVEKTQKSGVLLNKKNAYTIADNGDMVRVDVFCKVDKKGKNQYFIVPIYAWQVAENILPDIDCKGYRIDDSYTFCFSLHKYDLIAFQKDEKSKVEFAYYINCDSSSGGFYLAWHDKGSREQRFRISTQNLALIQKYQVNELGKEIRPCRLKKRPPVSGGSGGSGGSTNLSDIIEKETGKQLVIQESILMLPEEVEEVIGNKPESDILVHTAYDESTDENVMLLTSDAPEYKPWALVIQDSNGENKIKMLSGGSGGSGGSTNLSDIIEKETGKQLVIQESILMLPEEVEEVIGNKPESDILVHTAYDESTDENVMLLTSDAPEYKPWALVIQDSNGENKIKMLSGGSKRTADGSEFEPKKKRKV

SEQ ID NO: 3650 - protein, 1478 aa, synthetic construct
MKRTADGSEFESPKKKRKVSSEVEFSHEYWMRHALTLAKRARDEGAGPVGAVLVLNNRVIGEGWNRAIGLHDPTAHAEIMALRQGGLVMQNYRLFDATLYVTFEPCVMCAGAMINSRIGRVVFGVRNSKRGAAGSLMNVLNYPGMNHRVEITEGILADECAALLCDFYRMPRQVFNSQKKAQSSINSGGSSGGSSGSETPGTSESATPESSGGSSGGSGKRNYILGLAIGITSVGYGIIDYETRDVIDAGVRLFKEANVENNEGRRSKRGARRLKRRRRHRIQRVKKLLFDYNLLTDHSELSGINPYEARVKGLSQKLSEEEFSAALLHLAKRRGVHNVNEVEEDTGNELSTKEQISRNSKALEEKYVAELQLERLKKDGEVRGSINRFKTSDYVKEAKQLLKVQKAYHQLDQSFIDTYIDLLETRRTYYEGPGEGSPFGWKDIKEWYEMLMGHCTYFPEELRSVKYAYNADLYNALNDLNNLVITRDENEKLEYYEKFQIIENVFKQKKKPTLKQIAKEILVNEEDIKGYRVTSTGKPEFTNLKVYHDIKDITARKEIIENAELLDQIAKILTIYQSSEDIQEELTNLNSELTQEEIEQISNLKGYTGTHNLSLKAINLILDELWHTNDNQIAIFNRLKLVPKKVDLSQQKEIPTTLVDDFILSPVVKRSFIQSIKVINAIIKKYGLPNDIIIELAREKNSKDAQKMINEMQKRNRQTNERIEEIIRTTGKENAKYLIEKIKLHDMQEGKCLYSLEAIPLEDLLNNPFNYEVDHIIPRSVSFDNSFNNKVLVKQEENSKKGNRTPFQYLSSSDSKISYETFKKHILNLAKGKGRISKTKKEYLLEERDINRFSVQKDFINRNLVDTRYATRGLMNLLRSYFRVNNLDVKVKSINGGFTSFLRRKWKFKKERNKGYKHHAEDALIIANADFIFKEWKKLDKAKKVMENQMFEEKQAESMPEIETEQEYKEIFITPHQIKHIKDFKDYKYSHRVDKKPNRELINDTLYSTRKDDKGNTLIVNNLNGLYDKDNDKLKKLINKSPEKLLMYHHDPQTYQKLKLIMEQYGDEKNPLYKYYEETGNYLTKYSKKDNGPVIKKIKYYGNKLNAHLDITDDYPNSRNKVVKLSLKPYRFDVYLDNGVYKFVTVKNLDVIKKENYYEVNSKCYEEAKKLKKISNQAEFIASFYNNDLIKINGELYRVIGVNNDLLNRIEVNMIDITYREYLENMNDKRPPRIIKTIASKTQSIKKYSTDILGNLYEVKSKKHPQIIKKGSGGSGGSGGSTNLSDIIEKETGKQLVIQESILMLPEEVEEVIGNKPESDILVHTAYDESTDENVMLLTSDAPEYKPWALVIQDSNGENKIKMLSGGSGGSGGSTNLSDIIEKETGKQLVIQESILMLPEEVEEVIGNKPESDILVHTAYDESTDENVMLLTSDAPEYKPWALVIQDSNGENKIKMLSGGSKRTADGSEFEPKKKRKV

SEQ ID NO: 3651 - protein, 1792 aa, synthetic construct
MKRTADGSEFESPKKKRKVSSEVEFSHEYWMRHALTLAKRARDEGAGPVGAVLVLNNRVIGEGWNRAIGLHDPTAHAEIMALRQGGLVMQNYRLFDATLYVTFEPCVMCAGAMINSRIGRVVFGVRNSKRGAAGSLMNVLNYPGMNHRVEITEGILADECAALLCDFYRMPRQVFNSQKKAQSSINSGGSSGGSSGSETPGTSESATPESSGGSSGGSDKKYSIGLAIGTNSVGWAVITDEYKVPSKKFKVLGNTDRHSIKKNLIGALLFDSGETAEATRLKRTARRRYTRRKNRICYLQEIFSNEMAKVDDSFFHRLEESFLVEEDKKHERHPIFGNIVDEVAYHEKYPTIYHLRKKLVDSTDKADLRLIYLALAHMIKFRGHFLIEGDLNPDNSDVDKLFIQLVQTYNQLFEENPINASGVDAKAILSARLSKSRRLENLIAQLPGEKKNGLFGNLIALSLGLTPNFKSNFDLAEDAKLQLSKDTYDDDLDNLLAQIGDQYADLFLAAKNLSDAILLSDILRVNTEITKAPLSASMIKRYDEHHQDLTLLKALVRQQLPEKYKEIFFDQSKNGYAGYIDGGASQEEFYKFIKPILEKMDGTEELLVKLNREDLLRKQRTFDNGSIPHQIHLGELHAILRRQEDFYPFLKDNREKIEKILTFRIPYYVGPLARGNSRFAWMTRKSEETITPWNFEEVVDKGASAQSFIERMTNFDKNLPNEKVLPKHSLLYEYFTVYNELTKVKYVTEGMRKPAFLSGEQKKAIVDLLFKTNRKVTVKQLKEDYFKKIECFDSVEISGVEDRFNASLGTYHDLLKIIKDKDFLDNEENEDILEDIVLTLTLFEDREMIEERLKTYAHLFDDKVMKQLKRRRYTGWGRLSRKLINGIRDKQSGKTILDFLKSDGFANRNFMQLIHDDSLTFKEDIQKAQVSGQGDSLHEHIANLAGSPAIKKGILQTVKVVDELVKVMGRHKPENIVIEMARENQTTQKGQKNSRERMKRIEEGIKELGSQILKEHPVENTQLQNEKLYLYYLQNGRDMYVDQELDINRLSDYDVDHIVPQSFLKDDSIDNKVLTRSDKNRGKSDNVPSEEVVKKMKNYWRQLLNAKLITQRKFDNLTKAERGGLSELDKAGFIKRQLVETRQITKHVAQILDSRMNTKYDENDKLIREVKVITLKSKLVSDFRKDFQFYKVREINNYHHAHDAYLNAVVGTALIKKYPKLESEFVYGDYKVYDVRKMIAKSEQEIGKATAKYFFYSNIMNFFKTEITLANGEIRKRPLIETNGETGEIVWDKGRDFATVRKVLSMPQVNIVKKTEVQTGGFSKESIRPKRNSDKLIARKKDWDPKKYGGFVSPTVAYSVLVVAKVEKGKSKKLKSVKELLGITIMERSSFEKNPIDFLEAKGYKEVKKDLIIKLPKYSLFELENGRKRMLASARFLQKGNELALPSKYVNFLYLASHYEKLKGSPEDNEQKQLFVEQHKHYLDEIIEQISEFSKRVILADANLDKVLSAYNKHRDKPIREQAENIIHLFTLTNLGAPRAFKYFDTTIDRKVYRSTKEVLDATLIHQSITGLYETRIDLSQLGGDSGGSGGSGGSTNLSDIIEKETGKQLVIQESILMLPEEVEEVIGNKPESDILVHTAYDESTDENVMLLTSDAPEYKPWALVIQDSNGENKIKMLSGGSGGSGGSTNLSDIIEKETGKQLVIQESILMLPEEVEEVIGNKPESDILVHTAYDESTDENVMLLTSDAPEYKPWALVIQDSNGENKIKMLSGGSKRTADGSEFEPKKKRKV

SEQ ID NO: 3652 - protein, 1315 aa, synthetic construct
MKRTADGSEFESPKKKRKVSSEVEFSHEYWMRHALTLAKRARDEGAGPVGAVLVLNNRVIGEGWNRAIGLHDPTAHAEIMALRQGGLVMQNYRLFDATLYVTFEPCVMCAGAMINSRIGRVVFGVRNSKRGAAGSLMNVLNYPGMNHRVEITEGILADECAALLCDFYRMPRQVFNSQKKAQSSINSGGSSGGSSGSETPGTSESATPESSGGSSGGSARILAFAIGISSIGWAFSENDELKDCGVRIFTKVENPKTGESLALPRRLARSARKRYARRKARLNHLKHLIANEFKLNYEDYQSFDESLAKAYKGSLISPYELRFRALNELLSKQDFARVILHIAKRRGYDDIKNSDDKEKGAILKAIKQNEEKLANYQSVGEYLYKEYFQKFKENSKEFTNVRNKKESYERCIAQSFLKDELKLIFKKQREFGFSFSKKFEEEVLSVAFYKRALKDFSHLVGNCSFFTDEKRAPKNSPLAFMFVALTRIINLLNNLKNTEGILYTKDDLNALLNEVLKNGTLTYKQTKKLLGLSDDYEFKGEKGTYFIEFKKYKEFIKALGEHNLSQDDLNEIAKDITLIKDEIKLKKALAKYDLNQNQIDSLSKLEFKDHLNISFKALKLVTPLMLEGKKYDEACNELNLKVAINEDKKDFLPAFNETYYKDEVTNPVVLRAIKEYRKVLNALLKKYGKVHKINIELAREVGKNHSQRAKIEKEQNENYKAKKDAELECEKLGLKINSKNILKLRLFKEQKEFCAYSGEKIKISDLQDEKMLEIDHIYPYSRSFDDSYMNKVLVFTKQNQEKLNQTPFEAFGNDSAKWQKIEVLAKNLPTKKQKRILDKNYKDKEQKNFKDRNLNDTRYIARLVLNYTKDYLDFLPLSDDENTKLNDTQKGSKVHVEAKSGMLTSALRHTWGFSAKDRNNHLHHAIDAVIIAYANNSIVKAFSDFKKEQESNSAELYAKKISELDYKNKRKFFEPFSGFRQKVLDKIDEIFVSKPERKKPSGALHEETFRKEEEFYQSYGGKEGVLKALELGKIRKVNGKIVKNGDMFRVDIFKHKKTNKFYAVPIYTMDFALKVLPNKAVARSKKGEIKDWILMDENYEFCFSLYKDSLILIQTKKMQEPEFVYYNAFTSSTVSLIVSKHDNKFETLSKNQKILFKNANEKEVIAKSIGIQNLKVFEKYIVSALGEVTKAEFRQREDFKKSGGSGGSGGSTNLSDIIEKETGKQLVIQESILMLPEEVEEVIGNKPESDILVHTAYDESTDENVMLLTSDAPEYKPWALVIQDSNGENKIKMLSGGSKRTADGSEFEPKKKRKV

SEQ ID NO: 3653 - DNA, 7917 bp, synthetic construct
  source 1..7917: mol_type = other DNA
tagttattaatagtaatcaattacggggtcattagttcatagcccatatatggagttccgcgttacataacttacggtaaatggcccgcctggctgaccgcccaacgacccccgcccattgacgtcaataatgacgtatgttcccatagtaacgccaatagggactttccattgacgtcaatgggtggagtatttacggtaaactgcccacttggcagtacatcaagtgtatcatatgccaagtacgccccctattgacgtcaatgacggtaaatggcccgcctggcattatgcccagtacatgaccttatgggactttcctacttggcagtacatctacgtattagtcatcgctattaccatggtgatgcggttttggcagtacatcaatgggcgtggatagcggtttgactcacggggatttccaagtctccaccccattgacgtcaatgggagtttgttttggcaccaaaatcaacgggactttccaaaatgtcgtaacaactccgccccattgacgcaaatgggcggtaggcgtgtacggtgggaggtctatataagcagagctggtttagtgaaccgtcagatccgctagagatccgcggccgctaatacgactcactatagggagagccgccaccatgaaacggacagccgacggaagcgagttcgagtcaccaaagaagaagcggaaagtcagttctgaggtggagttttcccacgagtactggatgagacatgccctgaccctggccaagagggcacgggatgagggggcgggtcctgtgggagccgtgctggtgctgaacaatagagtgatcggcgagggctggaacagagccatcggcctgcacgacccaacagcccatgccgaaattatggccctgagacagggcggcctggtcatgcagaactacagactgtttgacgccaccctgtacgtgacattcgagccttgcgtgatgtgcgccggcgccatgatcaactctaggatcggccgcgtggtgtttggcgtgaggaactcaaaaagaggcgccgcaggctccctgatgaacgtgctgaactaccccggcatgaatcaccgcgtcgaaattaccgagggaatcctggcagatgaatgtgccgccctgctgtgcgatttctatcggatgcctagacaggtgttcaattctcagaagaaggcccagagctccatcaactctggcggatctagcggaggatcctctggcagcgagacaccaggaacaagcgagtcagcaacaccagagagcagtggcggcagcagcggcggcagcgcagcattcaagcctaacccaatcaattacatcctgggactggcaatcggaatcgcatccgtgggatgggctatggtggagatcgacgaggaggggaatcctatccggctgatcgatctgggcgtgagagtgtttgagagggccgaggtgccaaagaccggcgattctctggctatggcccggagactggcacggagcgtgaggcgcctgacacggagaagggcacacaggctgctgagggcacgccggctgctgaagagagagggcgtgctgcaggcagcagacttcgatgagaatggcctgatcacgagcttgccaaacaccccctggcagctgagagcagccgccctggacaggaagctgacaccactggagtggtctgccgtgctgctgcacctgatcaagcaccgcggctacctgagccagcggaagaacgagggagagacagcagccaaggagctgggcgccctgctgaagggagtggccaacaatgcccacgccctgcagaccggcgatttcaggacacctgccgagctggccctgaataagtttgagaaggagtccggccacatcagaaaccagaggggcgactatagccacaccttctcccgcaaggatctgcaggccgagctgatcctgctgttcgagaagcagaaggagtttggcaatccacacgtgagcggaggcctgaaggagggaatcgagaccctgctgatgacacagaggcctgccctgtccggcgacgcagtgcagaagatgctggggcactgcaccctcgagcctacagagccaaaggccgccaagaacacctacacagccgagcggtttatctggctgacaaagctgaacaatctgagaatcctggagcagggatccgagaggccactgaccgacacagagaggtccaccctgatggatgagccttaccggaagtctaaactgacatatgcccaggccagaaagctgctgggcctggaggacaccgccttctttaagggcctgagatacggcaaggataatgccgaggcctccacactgatggagatgaaggcctatcacgccatctctcgcgccctggagaaggagggcctgaaggacaagaagtcccccctgaacctgagctccgagctgcaggatgagatcggcaccgccttctctctgtttaagaccgacgaggatatcacaggccgcctgaaggacagggtgcagcctgagatcctggaggccctgctgaagcacatctctttcgataagtttgtgcagatcagcctgaaggccctgagaaggatcgtgccactgatggagcagggcaagcggtacgacgaggcctgcgccgagatctacggcgttcactatggcaagaagaacacagaggagaagatctatctgccccctatccctgccgacgagatcagaaatcctgtggtgctgagggccctgtcccaggcaagaaaagtgatcaacggagtggtgcgccggtacggatctccagcccggatccacatcgagaccgccagagaagtgggcaagagcttcaaggaccggaaggagatcgcgaagagacaggaggagaatcgcaaggatcgggagaaggccgccgccaagtttagggagtacttccctaactttgtgggcgagccaaagtctaaggacatcctgaagctgcgcctgtacgagcagcagcacggcaagtgtctgtatagcggcaaagagatcaatctggtgcggctgaacgagaagggctatgtggagatcgatcacgccctgcctttctccagaacctgggacgattcttttaacaataaggtgctggtgctgggcagcgagaaccagaataagggcaatcagacaccatacgagtatttcaatggcaaggacaactccagggagtggcaggagttcaaggcccgcgtggagacctctagatttcccagtagcaagaagcagcggatcctgctgcagaagttcgacgaggatggctttaaggagtgcaacctgaatgacaccagatacgtgaaccggttcctgtgccagtttgtggccgatcacatcctgctgaccggcaagggcaagagaagggtggtcgcctctaatggccagatcacaaacctgctgagggggttttggagactgaggaaggtgcgggcagagaatgacagacaccacgcactggatgcagtggtggtggcatgcagcaccgtggcaatgcagcagaagatcacaagattcgtgaggtataaggagatgaacgcctttgacggcaagaccgtcgataaggagacaggcaaggtgctgtaccagaagacccacttcccccagccttgggagttctttgcccaggaagttatgatccgggtgttcggcaagccagacggcaagcctgagtttgaggaggccgataccccagagaagctgaggacactgctggcagagaagctgtctagcaggccagaggcagtgcacgagtacgtgaccccgctgttcgtgtccagggcacccaatcggaagatgtctggcgcccacaaggacacactgagaagcgccaagaggtttgtgaagcacaacgagaagatctccgtgaagagagtgtggctgaccgagatcaagctggccgatctggagaacatggtgaattacaagaacggcagggagatcgagctgtatgaggccctgaaggcaaggctggaggcctacggaggaaatgccaagcaggccttcgacccaaaggataaccccttttataagaagggaggacagctggtgaaggccgtgcgggtggagaagacccagaaaagcggcgtgctgctgaataagaagaacgcctacacaatcgccgacaatggtgatatggtgagagtggacgtgttctgtaaggtggataagaagggcaagaatcagtactttatcgtgcctatctatgcctggcaggtggccgagaacatcctgccagacatcgattgcaagggctacagaatcgacgatagctatacattctgtttttccctgcacaagtatgacctgatcgccttccagaaggatgagaagtccaaggtggagtttgcctactatatcaattgcgactcctctagcggcgggttctacctggcctggcacgataagggcagcagggagcagcggtttcgcatctccacccagaatctggcgctgatccagaagtatcaggtgaacgagctgggcaaggagatcaggccatgtcggctgaagaagcgcccacccgtgagcggcgggagcggcgggagcggggggagcactaatctgagcgacatcattgagaaggagactgggaaacagctggtcattcaggagtccatcctgatgctgcctgaggaggtggaggaagtgatcggcaacaagccagagtctgacatcctggtgcacaccgcctacgacgagtccacagatgagaatgtgatgctgctgacctctgacgcccccgagtataagccttgggccctggtcatccaggattctaacggcgagaataagatcaagatgctgagcggaggatccggaggatctggaggcagcaccaacctgtctgacatcatcgagaaggagacaggcaagcagctggtcatccaggagagcatcctgatgctgcccgaagaagtcgaagaagtgatcggaaacaagcctgagagcgatatcctggtccataccgcctacgacgagagtaccgacgaaaatgtgatgctgctgacatccgacgccccagagtataagccctgggctctggtcatccaggattccaacggagagaacaaaatcaaaatgctgtctggcggctcaaaaagaaccgccgacggcagcgaattcgagcccaagaagaagaggaaagtctaaccggtcatcatcaccatcaccattgagtttaaacccgctgatcagcctcgactgtgccttctagttgccagccatctgttgtttgcccctcccccgtgccttccttgaccctggaaggtgccactcccactgtcctttcctaataaaatgaggaaattgcatcgcattgtctgagtaggtgtcattctattctggggggtggggtggggcaggacagcaagggggaggattgggaagacaatagcaggcatgctggggatgcggtgggctctatggcttctgaggcggaaagaaccagctggggctcgataccgtcgacctctagctagagcttggcgtaatcatggtcatagctgtttcctgtgtgaaattgttatccgctcacaattccacacaacatacgagccggaagcataaagtgtaaagcctagggtgcctaatgagtgagctaactcacattaattgcgttgcgctcactgcccgctttccagtcgggaaacctgtcgtgccagctgcattaatgaatcggccaacgcgcggggagaggcggtttgcgtattgggcgcacttccgcttcctcgctcactgactcgctgcgctcggtcgttcggctgcggcgagcggtatcagctcactcaaaggcggtaatacggttatccacagaatcaggggataacgcaggaaagaacatgtgagcaaaaggccagcaaaaggccaggaaccgtaaaaaggccgcgttgctggcgtttttccataggctccgcccccctgacgagcatcacaaaaatcgacgctcaagtcagaggtggcgaaacccgacaggactataaagataccaggcgtttccccctggaagctccctcgtgcgctctcctgttccgaccctgccgcttaccggatacctgtccgcctttctcccttcgggaagcgtggcgctttctcatagctcacgctgtaggtatctcagttcggtgtaggtcgttcgctccaagctgggctgtgtgcacgaaccccccgttcagcccgaccgctgcgccttatccggtaactatcgtcttgagtccaacccggtaagacacgacttatcgccactggcagcagccactggtaacaggattagcagagcgaggtatgtaggcggtgctacagagttcttgaagtggtggcctaactacggctacactagaagaacagtatttggtatctgcgctctgctgaagccagttaccttcggaaaaagagttggtagctcttgatccggcaaacaaaccaccgctggtagcggtggtttttttgtttgcaagcagcagattacgcgcagaaaaaaaggatctcaagaagatcctttgatcttttctacggggtctgacactcagtggaacgaaaactcacgttaagggattttggtcatgagattatcaaaaaggatcttcacctagatccttttaaattaaaaatgaagttttaaatcaatctaaagtatatatgagtaaacttggtctgacagttaccaatgcttaatcagtgaggcacctatctcagcgatctgtctatttcgttcatccatagttgcctgactccccgtcgtgtagataactacgatacgggagggcttaccatctggccccagtgctgcaatgataccgcgggacccacgctcaccggctccagatttatcagcaataaaccagccagccggaagggccgagcgcagaagtggtcctgcaactttatccgcctccatccagtctattaattgttgccgggaagctagagtaagtagttcgccagttaatagtttgcgcaacgttgttgccattgctacaggcatcgtggtgtcacgctcgtcgtttggtatggcttcattcagctccggttcccaacgatcaaggcgagttacatgatcccccatgttgtgcaaaaaagcggttagctccttcggtcctccgatcgttgtcagaagtaagttggccgcagtgttatcactcatggttatggcagcactgcataattctcttactgtcatgccatccgtaagatgcttttctgtgactggtgagtactcaaccaagtcattctgagaatagtgtatgcggcgaccgagttgctcttgcccggcgtcaatacgggataataccgcgccacatagcagaactttaaaagtgctcatcattggaaaacgttcttcggggcgaaaactctcaaggatcttaccgctgttgagatccagttcgatgtaacccactcgtgcacccaactgatcttcagcatcttttactttcaccagcgtttctgggtgagcaaaaacaggaaggcaaaatgccgcaaaaaagggaataagggcgacacggaaatgttgaatactcatactcttcctttttcaatattattgaagcatttatcagggttattgtctcatgagcggatacatatttgaatgtatttagaaaaataaacaaataggggttccgcgcacatttccccgaaaagtgccacctgacgtcgacggatcgggagatcgatctcccgatcccctagggtcgactctcagtacaatctgctctgatgccgcatagttaagccagtatctgctccctgcttgtgtgttggaggtcgctgagtagtgcgcgagcaaaatttaagctacaacaaggcaaggcttgaccgacaattgcatgaagaatctgcttagggttaggcgttttgcgctgcttcgcgatgtacgggccagatatacgcgttgacattgattattgac

SEQ ID NO: 3654 - DNA, 7347 bp, synthetic construct
  source 1..7347: mol_type = other DNA
attgatgcagtaatcatagcctacgctaacaacagcatcgtgaaagccttctccgatttcaagaaagaacaggagtctaatagcgccgagttgtacgccaagaaaatttccgaattggactataaaaataagagaaaattcttcgaacccttctccgggtttcgccaaaaggtcttagataagatcgacgagattttcgtttccaagcccgaaagaaaaaagccttcaggggcactgcacgaagagacattccgcaaggaagaggaattttaccaatcttacggtggtaaagagggagttctgaaggctctggagcttgggaagatccgcaaggtaaacgggaaaatcgtgaaaaacggggacatgttcagggtggatatcttcaagcacaaaaagaccaacaagttctacgcagtacccatctacactatggatttcgctttaaaggttctcccaaataaggcggtggctcgatcgaagaaaggagagatcaaggactggatcttaatggatgaaaattacgagttttgcttctcgctctacaaagatagcctgattctgatccagacaaaaaagatgcaggaaccagaatttgtttattataacgccttcacgagcagtacagtgtccctgattgtgagcaagcatgataacaagttcgagactctgtctaagaatcagaaaatccttttcaagaacgccaacgagaaggaggtcatcgcaaagtcaattggcatccaaaacctgaaggtgttcgagaaatacatagtgtccgcactcggtgaagtaactaaagccgaatttcgacagcgcgaggattttaagaaaagcggcgggagcggcgggagcggggggagcactaatctgagcgacatcattgagaaggagactgggaaacagctggtcattcaggagtccatcctgatgctgcctgaggaggtggaggaagtgatcggcaacaagccagagtctgacatcctggtgcacaccgcctacgacgagtccacagatgagaatgtgatgctgctgacctctgacgcccccgagtataagccttgggccctggtcatccaggattctaacggcgagaataagatcaagatgctgagcggaggatccaaaagaaccgccgacggcagcgaattcgagcccaagaagaagaggaaagtctaaccggtcatcatcaccatcaccattgagtttaaacccgctgatcagcctcgactgtgccttctagttgccagccatctgttgtttgcccctcccccgtgccttccttgaccctggaaggtgccactcccactgtcctttcctaataaaatgaggaaattgcatcgcattgtctgagtaggtgtcattctattctggggggtggggtggggcaggacagcaagggggaggattgggaagacaatagcaggcatgctggggatgcggtgggctctatggcttctgaggcggaaagaaccagctggggctcgataccgtcgacctctagctagagcttggcgtaatcatggtcatagctgtttcctgtgtgaaattgttatccgctcacaattccacacaacatacgagccggaagcataaagtgtaaagcctagggtgcctaatgagtgagctaactcacattaattgcgttgcgctcactgcccgctttccagtcgggaaacctgtcgtgccagctgcattaatgaatcggccaacgcgcggggagaggcggtttgcgtattgggcgcacttccgcttcctcgctcactgactcgctgcgctcggtcgttcggctgcggcgagcggtatcagctcactcaaaggcggtaatacggttatccacagaatcaggggataacgcaggaaagaacatgtgagcaaaaggccagcaaaaggccaggaaccgtaaaaaggccgcgttgctggcgtttttccataggctccgcccccctgacgagcatcacaaaaatcgacgctcaagtcagaggtggcgaaacccgacaggactataaagataccaggcgtttccccctggaagctccctcgtgcgctctcctgttccgaccctgccgcttaccggatacctgtccgcctttctcccttcgggaagcgtggcgctttctcatagctcacgctgtaggtatctcagttcggtgtaggtcgttcgctccaagctgggctgtgtgcacgaaccccccgttcagcccgaccgctgcgccttatccggtaactatcgtcttgagtccaacccggtaagacacgacttatcgccactggcagcagccactggtaacaggattagcagagcgaggtatgtaggcggtgctacagagttcttgaagtggtggcctaactacggctacactagaagaacagtatttggtatctgcgctctgctgaagccagttaccttcggaaaaagagttggtagctcttgatccggcaaacaaaccaccgctggtagcggtggtttttttgtttgcaagcagcagattacgcgcagaaaaaaaggatctcaagaagatcctttgatcttttctacggggtctgacactcagtggaacgaaaactcacgttaagggattttggtcatgagattatcaaaaaggatcttcacctagatccttttaaattaaaaatgaagttttaaatcaatctaaagtatatatgagtaaacttggtctgacagttaccaatgcttaatcagtgaggcacctatctcagcgatctgtctatttcgttcatccatagttgcctgactccccgtcgtgtagataactacgatacgggagggcttaccatctggccccagtgctgcaatgataccgcgggacccacgctcaccggctccagatttatcagcaataaaccagccagccggaagggccgagcgcagaagtggtcctgcaactttatccgcctccatccagtctattaattgttgccgggaagctagagtaagtagttcgccagttaatagtttgcgcaacgttgttgccattgctacaggcatcgtggtgtcacgctcgtcgtttggtatggcttcattcagctccggttcccaacgatcaaggcgagttacatgatcccccatgttgtgcaaaaaagcggttagctccttcggtcctccgatcgttgtcagaagtaagttggccgcagtgttatcactcatggttatggcagcactgcataattctcttactgtcatgccatccgtaagatgcttttctgtgactggtgagtactcaaccaagtcattctgagaatagtgtatgcggcgaccgagttgctcttgcccggcgtcaatacgggataataccgcgccacatagcagaactttaaaagtgctcatcattggaaaacgttcttcggggcgaaaactctcaaggatcttaccgctgttgagatccagttcgatgtaacccactcgtgcacccaactgatcttcagcatcttttactttcaccagcgtttctgggtgagcaaaaacaggaaggcaaaatgccgcaaaaaagggaataagggcgacacggaaatgttgaatactcatactcttcctttttcaatattattgaagcatttatcagggttattgtctcatgagcggatacatatttgaatgtatttagaaaaataaacaaataggggttccgcgcacatttccccgaaaagtgccacctgacgtcgacggatcgggagatcgatctcccgatcccctagggtcgactctcagtacaatctgctctgatgccgcatagttaagccagtatctgctccctgcttgtgtgttggaggtcgctgagtagtgcgcgagcaaaatttaagctacaacaaggcaaggcttgaccgacaattgcatgaagaatctgcttagggttaggcgttttgcgctgcttcgcgatgtacgggccagatatacgcgttgacattgattattgactagttattaatagtaatcaattacggggtcattagttcatagcccatatatggagttccgcgttacataacttacggtaaatggcccgcctggctgaccgcccaacgacccccgcccattgacgtcaataatgacgtatgttcccatagtaacgccaatagggactttccattgacgtcaatgggtggagtatttacggtaaactgcccacttggcagtacatcaagtgtatcatatgccaagtacgccccctattgacgtcaatgacggtaaatggcccgcctggcattatgcccagtacatgaccttatgggactttcctacttggcagtacatctacgtattagtcatcgctattaccatggtgatgcggttttggcagtacatcaatgggcgtggatagcggtttgactcacggggatttccaagtctccaccccattgacgtcaatgggagtttgttttggcaccaaaatcaacgggactttccaaaatgtcgtaacaactccgccccattgacgcaaatgggcggtaggcgtgtacggtgggaggtctatataagcagagctggtttagtgaaccgtcagatccgctagagatccgcggccgctaatacgactcactatagggagagccgccaccatgaaacggacagccgacggaagcgagttcgagtcaccaaagaagaagcggaaagtcagttctgaggtggagttttcccacgagtactggatgagacatgccctgaccctggccaagagggcacgggatgagggggcgggtcctgtgggagccgtgctggtgctgaacaatagagtgatcggcgagggctggaacagagccatcggcctgcacgacccaacagcccatgccgaaattatggccctgagacagggcggcctggtcatgcagaactacagactgtttgacgccaccctgtacgtgacattcgagccttgcgtgatgtgcgccggcgccatgatcaactctaggatcggccgcgtggtgtttggcgtgaggaactcaaaaagaggcgccgcaggctccctgatgaacgtgctgaactaccccggcatgaatcaccgcgtcgaaattaccgagggaatcctggcagatgaatgtgccgccctgctgtgcgatttctatcggatgcctagacaggtgttcaattctcagaagaaggcccagagctccatcaactctggcggatctagcggaggatcctctggcagcgagacaccaggaacaagcgagtcagcaacaccagagagcagtggcggcagcagcggcggcagcgcccgcatcctcgctttcgcaatcggaatctctagtatcggatgggccttctctgaaaacgacgaactgaaagactgcggcgtgagaatcttcacaaaggttgaaaaccctaaaacaggcgagtctttagctctgccacgtaggttggcccgctccgcccgaaaaaggtatgctcggcggaaggctcgcctcaaccacttgaagcatttgatagctaatgagttcaaactgaactacgaagattaccagtccttcgacgagtcattggcaaaagcctacaaaggcagccttatcagtccttatgagttgagatttcgcgcactcaacgaactgctttctaagcaagactttgctagggtcattctgcacatcgcaaaacggcgaggttatgacgatatcaagaactccgacgataaagaaaagggagccattctcaaggcgatcaaacagaatgaggaaaaattggcaaactaccagagtgtgggcgagtatctgtataaagagtatttccagaagtttaaggaaaacagcaaggagtttacaaacgtcagaaataaaaaggagtcttacgagagatgcatcgcgcagtcattcctcaaagatgagctgaagctgatatttaagaagcaacgcgaatttggtttctcattctctaagaagttcgaagaggaggttctttccgtggcgttttacaagagggcgctcaaagacttctcccacctggttggtaactgtagtttcttcacggatgagaagcgagctcccaaaaattctcccctggctttcatgtttgttgccctgactcggatcattaacctgctgaacaacctgaaaaatactgaagggatcttgtatacgaaggacgacctaaatgcactcctgaatgaagtgctcaaaaacggaactctaacctataaacagaccaagaaattactggggctctctgacgactacgagttcaagggcgagaagggtacttattttatcgaattcaaaaagtataaggagttcattaaagcattgggggaacacaacctcagccaggacgatctcaatgaaattgccaaggacatcacgctgattaaagacgagataaaactgaaaaaggcactggccaagtatgacctcaaccagaaccagatcgactctctgtccaagctggagttcaaagaccacctaaacatatccttcaaagccctgaaactggtcacccctctaatgctcgaaggaaaaaaatacgacgaggcgtgtaatgaactgaatcttaaggtggccatcaatgaggataagaaggactttcttccagcctttaacgagacatattacaaagacgaggtcacaaacccggttgtgctgagggccataaaagagtatcggaaggttctgaatgccctcctgaagaagtacggcaaagtgcacaaaataaatatcgaattggctagggaggtggggaagaaccattctcagcgagcaaagatcgagaaagagcagaatgagaactacaaagccaagaaagacgccgaactggagtgcgaaaagctggggcttaaaataaacagtaaaaacatcctgaaattaagattgttcaaagagcaaaaggagttttgcgcctactcaggggaaaaaatcaaaatatcagacctgcaggacgagaaaatgctggagatcgaccatatctatccgtatagcaggtcatttgacgattcctacatgaacaaagtgcttgtgtttaccaaacagaaccaagaaaagctgaaccaaaccccctttgaggctttcggaaacgactcagccaagtggcagaaaatcgaagtcctagccaagaatctgcctacaaaaaaacaaaagaggattcttgataagaactataaggacaaggaacagaaaaactttaaagacaggaacctgaatgacacgaggtacattgcgcgactggttctaaactataccaaagactacctggatttcctccctctgagcgacgacgagaatactaaactgaatgatacccagaaaggctcaaaggtccacgttgaggctaagtccgggatgctgactagcgccctccgccacacgtggggcttcagcgccaaagatcggaataatcatcttcatcacgct

SEQ ID NO: 3655 - DNA, 8778 bp, synthetic construct
  source 1..8778: mol_type = other DNA
tagttattaatagtaatcaattacggggtcattagttcatagcccatatatggagttccgcgttacataacttacggtaaatggcccgcctggctgaccgcccaacgacccccgcccattgacgtcaataatgacgtatgttcccatagtaacgccaatagggactttccattgacgtcaatgggtggagtatttacggtaaactgcccacttggcagtacatcaagtgtatcatatgccaagtacgccccctattgacgtcaatgacggtaaatggcccgcctggcattatgcccagtacatgaccttatgggactttcctacttggcagtacatctacgtattagtcatcgctattaccatggtgatgcggttttggcagtacatcaatgggcgtggatagcggtttgactcacggggatttccaagtctccaccccattgacgtcaatgggagtttgttttggcaccaaaatcaacgggactttccaaaatgtcgtaacaactccgccccattgacgcaaatgggcggtaggcgtgtacggtgggaggtctatataagcagagctggtttagtgaaccgtcagatccgctagagatccgcggccgctaatacgactcactatagggagagccgccaccatgaaacggacagccgacggaagcgagttcgagtcaccaaagaagaagcggaaagtcagttctgaggtggagttttcccacgagtactggatgagacatgccctgaccctggccaagagggcacgggatgagggggcgggtcctgtgggagccgtgctggtgctgaacaatagagtgatcggcgagggctggaacagagccatcggcctgcacgacccaacagcccatgccgaaattatggccctgagacagggcggcctggtcatgcagaactacagactgtttgacgccaccctgtacgtgacattcgagccttgcgtgatgtgcgccggcgccatgatcaactctaggatcggccgcgtggtgtttggcgtgaggaactcaaaaagaggcgccgcaggctccctgatgaacgtgctgaactaccccggcatgaatcaccgcgtcgaaattaccgagggaatcctggcagatgaatgtgccgccctgctgtgcgatttctatcggatgcctagacaggtgttcaattctcagaagaaggcccagagctccatcaactctggcggatctagcggaggatcctctggcagcgagacaccaggaacaagcgagtcagcaacaccagagagcagtggcggcagcagcggcggcagcgacaagaagtacagcatcggcctggccatcggcaccaactctgtgggctgggccgtgatcaccgacgagtacaaggtgcccagcaagaaattcaaggtgctgggcaacaccgaccggcacagcatcaagaagaacctgatcggagccctgctgttcgacagcggcgaaacagccgaggccacccggctgaagagaaccgccagaagaagatacaccagacggaagaaccggatctgctatctgcaagagatcttcagcaacgagatggccaaggtggacgacagcttcttccacagactggaagagtccttcctggtggaagaggataagaagcacgagcggcaccccatcttcggcaacatcgtggacgaggtggcctaccacgagaagtaccccaccatctaccacctgagaaagaaactggtggacagcaccgacaaggccgacctgcggctgatctatctggccctggcccacatgatcaagttccggggccacttcctgatcgagggcgacctgaaccccgacaacagcgacgtggacaagctgttcatccagctggtgcagacctacaaccagctgttcgaggaaaaccccatcaacgccagcggcgtggacgccaaggccatcctgtctgccagactgagcaagagcagacggctggaaaatctgatcgcccagctgcccggcgagaagaagaatggcctgttcggaaacctgattgccctgagcctgggcctgacccccaacttcaagagcaacttcgacctggccgaggatgccaaactgcagctgagcaaggacacctacgacgacgacctggacaacctgctggcccagatcggcgaccagtacgccgacctgtttctggccgccaagaacctgtccgacgccatcctgctgagcgacatcctgagagtgaacaccgagatcaccaaggcccccctgagcgcctctatgatcaagagatacgacgagcaccaccaggacctgaccctgctgaaagctctcgtgcggcagcagctgcctgagaagtacaaagagattttcttcgaccagagcaagaacggctacgccggctacattgacggcggagccagccaggaagagttctacaagttcatcaagcccatcctggaaaagatggacggcaccgaggaactgctcgtgaagctgaacagagaggacctgctgcggaagcagcggaccttcgacaacggcagcatcccccaccagatccacctgggagagctgcacgccattctgcggcggcaggaagatttttacccattcctgaaggacaaccgggaaaagatcgagaagatcctgaccttccgcatcccctactacgtgggccctctggccaggggaaacagcagattcgcctggatgaccagaaagagcgaggaaaccatcaccccctggaacttcgaggaagtggtggacaagggcgcttccgcccagagcttcatcgagcggatgaccaacttcgataagaacctgcccaacgagaaggtgctgcccaagcacagcctgctgtacgagtacttcaccgtgtataacgagctgaccaaagtgaaatacgtgaccgagggaatgagaaagcccgccttcctgagcggcgagcagaaaaaggccatcgtggacctgctgttcaagaccaaccggaaagtgaccgtgaagcagctgaaagaggactacttcaagaaaatcgagtgcttcgactccgtggaaatctccggcgtggaagatcggttcaacgcctccctgggcacataccacgatctgctgaaaattatcaaggacaaggacttcctggacaatgaggaaaacgaggacattctggaagatatcgtgctgaccctgacactgtttgaggacagagagatgatcgaggaacggctgaaaacctatgcccacctgttcgacgacaaagtgatgaagcagctgaagcggcggagatacaccggctggggcaggctgagccggaagctgatcaacggcatccgggacaagcagtccggcaagacaatcctggatttcctgaagtccgacggcttcgccaacagaaacttcatgcagctgatccacgacgacagcctgacctttaaagaggacatccagaaagcccaggtgtccggccagggcgatagcctgcacgagcacattgccaatctggccggcagccccgccattaagaagggcatcctgcagacagtgaaggtggtggacgagctcgtgaaagtgatgggccggcacaagcccgagaacatcgtgatcgaaatggccagagagaaccagaccacccagaagggacagaagaacagccgcgagagaatgaagcggatcgaagagggcatcaaagagctgggcagccagatcctgaaagaacaccccgtggaaaacacccagctgcagaacgagaagctgtacctgtactacctgcagaatgggcgggatatgtacgtggaccaggaactggacatcaaccggctgtccgactacgatgtggaccatatcgtgcctcagagctttctgaaggacgactccatcgacaacaaggtgctgaccagaagcgacaagaaccggggcaagagcgacaacgtgccctccgaagaggtcgtgaagaagatgaagaactactggcggcagctgctgaacgccaagctgattacccagagaaagttcgacaatctgaccaaggccgagagaggcggcctgagcgaactggataaggccggcttcatcaagagacagctggtggaaacccggcagatcacaaagcacgtggcacagatcctggactcccggatgaacactaagtacgacgagaatgacaagctgatccgggaagtgaaagtgatcaccctgaagtccaagctggtgtccgatttccggaaggatttccagttttacaaagtgcgcgagatcaacaactaccaccacgcccacgacgcctacctgaacgccgtcgtgggaaccgccctgatcaaaaagtaccctaagctggaaagcgagttcgtgtacggcgactacaaggtgtacgacgtgcggaagatgatcgccaagagcgagcaggaaatcggcaaggctaccgccaagtacttcttctacagcaacatcatgaactttttcaagaccgagattaccctggccaacggcgagatccggaagcggcctctgatcgagacaaacggcgaaaccggggagatcgtgtgggataagggccgggattttgccaccgtgcggaaagtgctgagcatgccccaagtgaatatcgtgaaaaagaccgaggtgcagacaggcggcttcagcaaagagtctatcctgcccaagaggaacagcgataagctgatcgccagaaagaaggactgggaccctaagaagtacggcggcttcgacagccccaccgtggcctattctgtgctggtggtggccaaagtggaaaagggcaagtccaagaaactgaagagtgtgaaagagctgctggggatcaccatcatggaaagaagcagcttcgagaagaatcccatcgactttctggaagccaagggctacaaagaagtgaaaaaggacctgatcatcaagctgcctaagtactccctgttcgagctggaaaacggccggaagagaatgctggcctctgccggcgaactgcagaagggaaacgaactggccctgccctccaaatatgtgaacttcctgtacctggccagccactatgagaagctgaagggctcccccgaggataatgagcagaaacagctgtttgtggaacagcacaagcactacctggacgagatcatcgagcagatcagcgagttctccaagagagtgatcctggccgacgctaatctggacaaagtgctgtccgcctacaacaagcaccgggataagcccatcagagagcaggccgagaatatcatccacctgtttaccctgaccaatctgggagcccctgccgccttcaagtactttgacaccaccatcgaccggaagaggtacaccagcaccaaagaggtgctggacgccaccctgatccaccagagcatcaccggcctgtacgagacacggatcgacctgtctcagctgggaggtgacagcggcgggagcggcgggagcggggggagcactaatctgagcgacatcattgagaaggagactgggaaacagctggtcattcaggagtccatcctgatgctgcctgaggaggtggaggaagtgatcggcaacaagccagagtctgacatcctggtgcacaccgcctacgacgagtccacagatgagaatgtgatgctgctgacctctgacgcccccgagtataagccttgggccctggtcatccaggattctaacggcgagaataagatcaagatgctgagcggaggatccggaggatctggaggcagcaccaacctgtctgacatcatcgagaaggagacaggcaagcagctggtcatccaggagagcatcctgatgctgcccgaagaagtcgaagaagtgatcggaaacaagcctgagagcgatatcctggtccataccgcctacgacgagagtaccgacgaaaatgtgatgctgctgacatccgacgccccagagtataagccctgggctctggtcatccaggattccaacggagagaacaaaatcaaaatgctgtctggcggctcaaaaagaaccgccgacggcagcgaattcgagcccaagaagaagaggaaagtctaaccggtcatcatcaccatcaccattgagtttaaacccgctgatcagcctcgactgtgccttctagttgccagccatctgttgtttgcccctcccccgtgccttccttgaccctggaaggtgccactcccactgtcctttcctaataaaatgaggaaattgcatcgcattgtctgagtaggtgtcattctattctggggggtggggtggggcaggacagcaagggggaggattgggaagacaatagcaggcatgctggggatgcggtgggctctatggcttctgaggcggaaagaaccagctggggctcgataccgtcgacctctagctagagcttggcgtaatcatggtcatagctgtttcctgtgtgaaattgttatccgctcacaattccacacaacatacgagccggaagcataaagtgtaaagcctagggtgcctaatgagtgagctaactcacattaattgcgttgcgctcactgcccgctttccagtcgggaaacctgtcgtgccagctgcattaatgaatcggccaacgcgcgggaagaggcggtttgcgtattgggcgcacttccgcttcctcgctcactgactcgctgcgctcggtcgttcggctgcggcgagcggtatcagctcactcaaaggcggtaatacggttatccacagaatcaggggataacgcaggaaagaacatgtgagcaaaaggccagcaaaaggccaggaaccgtaaaaaggccgcgttgctggcgtttttccataggctccgcccccctgacgagcatcacaaaaatcgacgctcaagtcagaggtggcgaaacccgacaggactataaagataccaggcgtttccccctggaagctccctcgtgcgctctcctgttccgaccctgccgcttaccggatacctgtccgcctttctcccttcgggaagcgtggcgctttctcatagctcacgctgtaggtatctcagttcggtgtaggtcgttcgctccaagctgggctgtgtgcacgaaccccccgttcagcccgaccgctgcgccttatccggtaactatcgtcttgagtccaacccggtaagacacgacttatcgccactggcagcagccactggtaacaggattagcagagcgaggtatgtaggcggtgctacagagttcttgaagtggtggcctaactacggctacactagaagaacagtatttggtatctgcgctctgctgaagccagttaccttcggaaaaagagttggtagctcttgatccggcaaacaaaccaccgctggtagcggtggtttttttgtttgcaagcagcagattacgcgcagaaaaaaaggatctcaagaaaatcctttgatcttttctacggggtctgacactcagtggaacgaaaactcacgttaagggattttggtcatgagattatcaaaaaggatcttcacctagatccttttaaattaaaaatgaagttttaaatcaatctaaagtatatatgagtaaacttggtctgacagttaccaatgcttaatcagtgaggcacctatctcagcgatctgtctatttcgttcatccatagttgcctgactccccgtcgtgtagataactacgatacgggagggcttaccatctggccccagtgctgcaatgataccgcgggacccacgctcaccggctccagatttatcagcaataaaccagccagccggaagggccgagcgcagaagtggtcctgcaactttatccgcctccatccagtctattaattgttgccgggaagctagagtaagtagttcgccagttaatagtttgcgcaacgttgttgccattgctacaggcatcgtggtgtcacgctcgtcgtttggtatggcttcattcagctccggttcccaacgatcaaggcgagttacatgatcccccatgttgtgcaaaaaagcggttagctccttcggtcctccgatcgttgtcagaagtaagttggccgcagtgttatcactcatggttatggcagcactgcataattctcttactgtcatgccatccgtaagatgcttttctgtgactggtgagtactcaaccaagtcattctgagaatagtgtatgcggcgaccgagttgctcttgcccggcgtcaatacgggataataccgcgccacatagcagaactttaaaagtgctcatcattggaaaacgttcttcggggcgaaaactctcaaggatcttaccgctgttgagatccagttcgatgtaacccactcgtgcacccaactgatcttcagcatcttttactttcaccagcgtttctgggtgagcaaaaacaggaaggcaaaatgccgcaaaaaagggaataagggcgacacggaaatgttgaatactcatactcttcctttttcaatattattgaagcatttatcagggttattgtctcatgagcggatacatatttgaatgtatttagaaaaataaacaaataggggttccgcgcacatttccccgaaaagtgccacctgacgtcgacggatcgggagatcgatctcccgatcccctagggtcgactctcagtacaatctgctctgatgccgcatagttaagccagtatctgctccctgcttgtgtgttggaggtcgctgagtagtgcgcgagcaaaatttaagctacaacaaggcaaggcttgaccgacaattgcatgaagaatctgcttagggttaggcgttttgcgctgcttcgcgatgtacgggccagatatacgcgttgacattgattattgac

SEQ ID NO: 3656 - DNA, 7836 bp, synthetic construct
  source 1..7836: mol_type = other DNA
tagttattaatagtaatcaattacggggtcattagttcatagcccatatatggagttccgcgttacataacttacggtaaatggcccgcctggctgaccgcccaacgacccccgcccattgacgtcaataatgacgtatgttcccatagtaacgccaatagggactttccattgacgtcaatgggtggagtatttacggtaaactgcccacttggcagtacatcaagtgtatcatatgccaagtacgccccctattgacgtcaatgacggtaaatggcccgcctggcattatgcccagtacatgaccttatgggactttcctacttggcagtacatctacgtattagtcatcgctattaccatggtgatgcggttttggcagtacatcaatgggcgtggatagcggtttgactcacggggatttccaagtctccaccccattgacgtcaatgggagtttgttttggcaccaaaatcaacgggactttccaaaatgtcgtaacaactccgccccattgacgcaaatgggcggtaggcgtgtacggtgggaggtctatataagcagagctggtttagtgaaccgtcagatccgctagagatccgcggccgctaatacgactcactatagggagagccgccaccatgaaacggacagccgacggaagcgagttcgagtcaccaaagaagaagcggaaagtcagttctgaggtggagttttcccacgagtactggatgagacatgccctgaccctggccaagagggcacgggatgagggggcgggtcctgtgggagccgtgctggtgctgaacaatagagtgatcggcgagggctggaacagagccatcggcctgcacgacccaacagcccatgccgaaattatggccctgagacagggcggcctggtcatgcagaactacagactgtttgacgccaccctgtacgtgacattcgagccttgcgtgatgtgcgccggcgccatgatcaactctaggatcggccgcgtggtgtttggcgtgaggaactcaaaaagaggcgccgcaggctccctgatgaacgtgctgaactaccccggcatgaatcaccgcgtcgaaattaccgagggaatcctggcagatgaatgtgccgccctgctgtgcgatttctatcggatgcctagacaggtgttcaattctcagaagaaggcccagagctccatcaactctggcggatctagcggaggatcctctggcagcgagacaccaggaacaagcgagtcagcaacaccagagagcagtggcggcagcagcggcggcagcgggaagcgaaattacattctggggctggccattggcattacatcagtgggctatggcatcattgactacgagacaagggacgtgatcgacgccggcgtgagactgttcaaggaggccaacgtggagaacaatgagggccggagatccaagaggggagcaaggcgcctgaagcggagaaggcgccacagaatccagagagtgaagaagctgctgttcgattacaacctgctgaccgaccactccgagctgtctggcatcaatccttatgaggccagagtgaagggcctgtcccagaagctgtctgaggaggagtttagcgccgccctgctgcacctggcaaagaggagaggcgtgcacaacgtgaatgaggtggaggaggacaccggcaacgagctgtccacaaaggagcagatcagccgcaattccaaggccctggaggagaagtatgtggccgagctgcagctggagcggctgaagaaggatggcgaggtgaggggctccatcaatcgcttcaagacctctgactacgtgaaggaggccaagcagctgctgaaggtgcagaaggcctaccaccagctggatcagtcctttatcgatacatatatcgacctgctggagacaaggcgcacatactatgagggaccaggagagggctctcccttcggctggaaggacatcaaggagtggtacgagatgctgatgggccactgcacctattttccagaggagctgagaagcgtgaagtacgcctataacgccgatctgtacaacgccctgaatgacctgaacaacctggtcatcaccagggatgagaacgagaagctggagtactatgagaagttccagatcatcgagaacgtgttcaagcagaagaagaagcctacactgaagcagatcgccaaggagatcctggtgaacgaggaggacatcaagggctaccgcgtgacctccacaggcaagccagagttcaccaatctgaaggtgtatcacgatatcaaggacatcacagcccggaaggagatcatcgagaacgccgagctgctggatcagatcgccaagatcctgaccatctatcagagctccgaggacatccaggaggagctgaccaacctgaatagcgagctgacacaggaggagatcgagcagatcagcaatctgaagggctacaccggcacacacaacctgagcctgaaggccatcaatctgatcctggatgagctgtggcacacaaacgacaatcagatcgccatctttaaccggctgaagctggtgccaaagaaggtggacctgtcccagcagaaggagatcccaaccacactggtggacgatttcatcctgtctcccgtggtgaagcggagcttcatccagagcatcaaagtgatcaacgccatcatcaagaagtacggcctgcccaatgatatcatcatcgagctggccagggagaagaactccaaggacgcccagaagatgatcaatgagatgcagaagaggaaccgccagaccaatgagcggatcgaggagatcatcagaaccacaggcaaggagaacgccaagtacctgatcgagaagatcaagctgcacgatatgcaggagggcaagtgtctgtattctctggaggccatccctctggaggacctgctgaacaatccattcaactacgaggtggatcacatcatcccccggagcgtgagcttcgacaattcttttaacaataaggtgctggtgaagcaggaggagaacagcaagaagggcaataggacccctttccagtacctgtctagctccgattctaagatcagctacgagacattcaagaagcacatcctgaatctggccaagggcaagggccgcatcagcaagaccaagaaggagtacctgctggaggagcgggacatcaacagattctccgtgcagaaggacttcatcaaccggaatctggtggacaccagatacgccacacgcggcctgatgaatctgctgcggtcttatttcagagtgaacaatctggatgtgaaggtaaagagcatcaacggcggcttcacctcctttctgcggagaaagtggaagtttaagaaggagcgcaacaagggctataagcaccacgccgaggatgccctgatcatcgccaatgccgacttcatctttaaggagtggaagaagctggacaaggccaagaaagtgatggagaaccagatgttcgaggagaagcaggccgagagcatgcccgagatcgagacagagcaggagtacaaggagattttcatcacacctcaccagatcaagcacatcaaggacttcaaggactacaagtattctcacagggtggataagaagcccaaccgcgagctgatcaatgacaccctgtatagcacacggaaggacgataagggcaataccctgatcgtgaacaatctgaacggcctgtacgacaaggataatgacaagctgaagaagctgatcaacaagtctcccgagaagctgctgatgtaccaccacgatcctcagacatatcagaagctgaagctgatcatggagcagtacggcgacgagaagaacccactgtataagtactatgaggagacaggcaactacctgacaaagtatagcaagaaggataatggccccgtgatcaagaagatcaagtactatggcaacaagctgaatgcccacctggacatcaccgacgattaccctaactctcgcaataaggtggtgaagctgagcctgaagccataccggttcgacgtgtacctggacaacggcgtgtataagtttgtgacagtgaagaatctggatgtgatcaagaaggagaactactatgaggtgaacagcaagtgctacgaggaggccaagaagctgaagaagatcagcaaccaggccgagttcatcgcctctttttacaacaatgacctgatcaagatcaatggcgagctgtatagagtgatcggcgtgaacaatgatctgctgaacagaatcgaagtgaatatgatcgacatcacctacagggagtatctggagaacatgaatgataagaggccccctcgcatcatcaagaccatcgcctctaagacacagagcatcaagaagtacagcacagacatcctggggaacctgtatgaagtcaagagcaagaaacatcctcagattatcaagaaaggcagcggcgggagcggcgggagcggggggagcactaatctgagcgacatcattgagaaggagactgggaaacagctggtcattcaggagtccatcctgatgctgcctgaggaggtggaggaagtgatcggcaacaagccagagtctgacatcctggtgcacaccgcctacgacgagtccacagatgagaatgtgatgctgctgacctctgacgcccccgagtataagccttgggccctggtcatccaggattctaacggcgagaataagatcaagatgctgagcggaggatccggaggatctggaggcagcaccaacctgtctgacatcatcgagaaggagacaggcaagcagctggtcatccaggagagcatcctgatgctgcccgaagaagtcgaagaagtgatcggaaacaagcctgagagcgatatcctggtccataccgcctacgacgagagtaccgacgaaaatgtgatgctgctgacatccgacgccccagagtataagccctgggctctggtcatccaggattccaacggagagaacaaaatcaaaatgctgtctggcggctcaaaaagaaccgccgacggcagcgaattcgagcccaagaagaagaggaaagtctaaccggtcatcatcaccatcaccattgagtttaaacccgctgatcagcctcgactgtgccttctagttgccagccatctgttgtttgcccctcccccgtgccttccttgaccctggaaggtgccactcccactgtcctttcctaataaaatgaggaaattgcatcgcattgtctgagtaggtgtcattctattctggggggtggggtggggcaggacagcaagggggaggattgggaagacaatagcaggcatgctggggatgcggtgggctctatggcttctgaggcggaaagaaccagctggggctcgataccgtcgacctctagctagagcttggcgtaatcatggtcatagctgtttcctgtgtgaaattgttatccgctcacaattccacacaacatacgagccggaagcataaagtgtaaagcctagggtgcctaatgagtgagctaactcacattaattgcgttgcgctcactgcccgctttccagtcgggaaacctgtcgtgccagctgcattaatgaatcggccaacgcgcgggaagaggcggtttgcgtattgggcgcacttccgcttcctcgctcactgactcgctgcgctcggtcgttcggctgcggcgagcggtatcagctcactcaaaggcggtaatacggttatccacagaatcaggggataacgcaggaaagaacatgtgagcaaaaggccagcaaaaggccaggaaccgtaaaaaggccgcgttgctggcgtttttccataggctccgcccccctgacgagcatcacaaaaatcgacgctcaagtcagaggtggcgaaacccgacaggactataaagataccaggcgtttccccctggaagctccctcgtgcgctctcctgttccgaccctgccgcttaccggatacctgtccgcctttctcccttcgggaagcgtggcgctttctcatagctcacgctgtaggtatctcagttcggtgtaggtcgttcgctccaagctgggctgtgtgcacgaaccccccgttcagcccgaccgctgcgccttatccggtaactatcgtcttgagtccaacccggtaagacacgacttatcgccactggcagcagccactggtaacaggattagcagagcgaggtatgtaggcggtgctacagagttcttgaagtggtggcctaactacggctacactagaagaacagtatttggtatctgcgctctgctgaagccagttaccttcggaaaaagagttggtagctcttgatccggcaaacaaaccaccgctggtagcggtggtttttttgtttgcaagcagcagattacgcgcagaaaaaaaggatctcaagaaaatcctttgatcttttctacggggtctgacactcagtggaacgaaaactcacgttaagggattttggtcatgagattatcaaaaaggatcttcacctagatccttttaaattaaaaatgaagttttaaatcaatctaaagtatatatgagtaaacttggtctgacagttaccaatgcttaatcagtgaggcacctatctcagcgatctgtctatttcgttcatccatagttgcctgactccccgtcgtgtagataactacgatacgggagggcttaccatctggccccagtgctgcaatgataccgcgggacccacgctcaccggctccagatttatcagcaataaaccagccagccggaagggccgagcgcagaagtggtcctgcaactttatccgcctccatccagtctattaattgttgccgggaagctagagtaagtagttcgccagttaatagtttgcgcaacgttgttgccattgctacaggcatcgtggtgtcacgctcgtcgtttggtatggcttcattcagctccggttcccaacgatcaaggcgagttacatgatcccccatgttgtgcaaaaaagcggttagctccttcggtcctccgatcgttgtcagaagtaagttggccgcagtgttatcactcatggttatggcagcactgcataattctcttactgtcatgccatccgtaagatgcttttctgtgactggtgagtactcaaccaagtcattctgagaatagtgtatgcggcgaccgagttgctcttgcccggcgtcaatacgggataataccgcgccacatagcagaactttaaaagtgctcatcattggaaaacgttcttcggggcgaaaactctcaaggatcttaccgctgttgagatccagttcgatgtaacccactcgtgcacccaactgatcttcagcatcttttactttcaccagcgtttctgggtgagcaaaaacaggaaggcaaaatgccgcaaaaaagggaataagggcgacacggaaatgttgaatactcatactcttcctttttcaatattattgaagcatttatcagggttattgtctcatgagcggatacatatttgaatgtatttagaaaaataaacaaataggggttccgcgcacatttccccgaaaagtgccacctgacgtcgacggatcgggagatcgatctcccgatcccctagggtcgactctcagtacaatctgctctgatgccgcatagttaagccagtatctgctccctgcttgtgtgttggaggtcgctgagtagtgcgcgagcaaaatttaagctacaacaaggcaaggcttgaccgacaattgcatgaagaatctgcttagggttaggcgttttgcgctgcttcgcgatgtacgggccagatatacgcgttgacattgattattgac

SEQ ID NO: 3657 - DNA, 8778 bp, synthetic construct
  source 1..8778: mol_type = other DNA
tagttattaatagtaatcaattacggggtcattagttcatagcccatatatggagttccgcgttacataacttacggtaaatggcccgcctggctgaccgcccaacgacccccgcccattgacgtcaataatgacgtatgttcccatagtaacgccaatagggactttccattgacgtcaatgggtggagtatttacggtaaactgcccacttggcagtacatcaagtgtatcatatgccaagtacgccccctattgacgtcaatgacggtaaatggcccgcctggcattatgcccagtacatgaccttatgggactttcctacttggcagtacatctacgtattagtcatcgctattaccatggtgatgcggttttggcagtacatcaatgggcgtggatagcggtttgactcacggggatttccaagtctccaccccattgacgtcaatgggagtttgttttggcaccaaaatcaacgggactttccaaaatgtcgtaacaactccgccccattgacgcaaatgggcggtaggcgtgtacggtgggaggtctatataagcagagctggtttagtgaaccgtcagatccgctagagatccgcggccgctaatacgactcactatagggagagccgccaccatgaaacggacagccgacggaagcgagttcgagtcaccaaagaagaagcggaaagtcagttctgaggtggagttttcccacgagtactggatgagacatgccctgaccctggccaagagggcacgggatgagggggcgggtcctgtgggagccgtgctggtgctgaacaatagagtgatcggcgagggctggaacagagccatcggcctgcacgacccaacagcccatgccgaaattatggccctgagacagggcggcctggtcatgcagaactacagactgtttgacgccaccctgtacgtgacattcgagccttgcgtgatgtgcgccggcgccatgatcaactctaggatcggccgcgtggtgtttggcgtgaggaactcaaaaagaggcgccgcaggctccctgatgaacgtgctgaactaccccggcatgaatcaccgcgtcgaaattaccgagggaatcctggcagatgaatgtgccgccctgctgtgcgatttctatcggatgcctagacaggtgttcaattctcagaagaaggcccagagctccatcaactctggcggatctagcggaggatcctctggcagcgagacaccaggaacaagcgagtcagcaacaccagagagcagtggcggcagcagcggcggcagcgacaagaagtacagcatcggcctggccatcggcaccaactctgtgggctgggccgtgatcaccgacgagtacaaggtgcccagcaagaaattcaaggtgctgggcaacaccgaccggcacagcatcaagaagaacctgatcggagccctgctgttcgacagcggcgaaacagccgaggccacccggctgaagagaaccgccagaagaagatacaccagacggaagaaccggatctgctatctgcaagagatcttcagcaacgagatggccaaggtggacgacagcttcttccacagactggaagagtccttcctggtggaagaggataagaagcacgagcggcaccccatcttcggcaacatcgtggacgaggtggcctaccacgagaagtaccccaccatctaccacctgagaaagaaactggtggacagcaccgacaaggccgacctgcggctgatctatctggccctggcccacatgatcaagttccggggccacttcctgatcgagggcgacctgaaccccgacaacagcgacgtggacaagctgttcatccagctggtgcagacctacaaccagctgttcgaggaaaaccccatcaacgccagcggcgtggacgccaaggccatcctgtctgccagactgagcaagagcagacggctggaaaatctgatcgcccagctgcccggcgagaagaagaatggcctgttcggaaacctgattgccctgagcctgggcctgacccccaacttcaagagcaacttcgacctggccgaggatgccaaactgcagctgagcaaggacacctacgacgacgacctggacaacctgctggcccagatcggcgaccagtacgccgacctgtttctggccgccaagaacctgtccgacgccatcctgctgagcgacatcctgagagtgaacaccgagatcaccaaggcccccctgagcgcctctatgatcaagagatacgacgagcaccaccaggacctgaccctgctgaaagctctcgtgcggcagcagctgcctgagaagtacaaagagattttcttcgaccagagcaagaacggctacgccggctacattgacggcggagccagccaggaagagttctacaagttcatcaagcccatcctggaaaagatggacggcaccgaggaactgctcgtgaagctgaacagagaggacctgctgcggaagcagcggaccttcgacaacggcagcatcccccaccagatccacctgggagagctgcacgccattctgcggcggcaggaagatttttacccattcctgaaggacaaccgggaaaagatcgagaagatcctgaccttccgcatcccctactacgtgggccctctggccaggggaaacagcagattcgcctggatgaccagaaagagcgaggaaaccatcaccccctggaacttcgaggaagtggtggacaagggcgcttccgcccagagcttcatcgagcggatgaccaacttcgataagaacctgcccaacgagaaggtgctgcccaagcacagcctgctgtacgagtacttcaccgtgtataacgagctgaccaaagtgaaatacgtgaccgagggaatgagaaagcccgccttcctgagcggcgagcagaaaaaggccatcgtggacctgctgttcaagaccaaccggaaagtgaccgtgaagcagctgaaagaggactacttcaagaaaatcgagtgcttcgactccgtggaaatctccggcgtggaagatcggttcaacgcctccctgggcacataccacgatctgctgaaaattatcaaggacaaggacttcctggacaatgaggaaaacgaggacattctggaagatatcgtgctgaccctgacactgtttgaggacagagagatgatcgaggaacggctgaaaacctatgcccacctgttcgacgacaaagtgatgaagcagctgaagcggcggagatacaccggctggggcaggctgagccggaagctgatcaacggcatccgggacaagcagtccggcaagacaatcctggatttcctgaagtccgacggcttcgccaacagaaacttcatgcagctgatccacgacgacagcctgacctttaaagaggacatccagaaagcccaggtgtccggccagggcgatagcctgcacgagcacattgccaatctggccggcagccccgccattaagaagggcatcctgcagacagtgaaggtggtggacgagctcgtgaaagtgatgggccggcacaagcccgagaacatcgtgatcgaaatggccagagagaaccagaccacccagaagggacagaagaacagccgcgagagaatgaagcggatcgaagagggcatcaaagagctgggcagccagatcctgaaagaacaccccgtggaaaacacccagctgcagaacgagaagctgtacctgtactacctgcagaatgggcgggatatgtacgtggaccaggaactggacatcaaccggctgtccgactacgatgtggaccatatcgtgcctcagagctttctgaaggacgactccatcgacaacaaggtgctgaccagaagcgacaagaaccggggcaagagcgacaacgtgccctccgaagaggtcgtgaagaagatgaagaactactggcggcagctgctgaacgccaagctgattacccagagaaagttcgacaatctgaccaaggccgagagaggcggcctgagcgaactggataaggccggcttcatcaagagacagctggtggaaacccggcagatcacaaagcacgtggcacagatcctggactcccggatgaacactaagtacgacgagaatgacaagctgatccgggaagtgaaagtgatcaccctgaagtccaagctggtgtccgatttccggaaggatttccagttttacaaagtgcgcgagatcaacaactaccaccacgcccacgacgcctacctgaacgccgtcgtgggaaccgccctgatcaaaaagtaccctaagctggaaagcgagttcgtgtacggcgactacaaggtgtacgacgtgcggaagatgatcgccaagagcgagcaggaaatcggcaaggctaccgccaagtacttcttctacagcaacatcatgaactttttcaagaccgagattaccctggccaacggcgagatccggaagcggcctctgatcgagacaaacggcgaaaccggggagatcgtgtgggataagggccgggattttgccaccgtgcggaaagtgctgagcatgccccaagtgaatatcgtgaaaaagaccgaggtgcagacaggcggcttcagcaaagagtctatccggcccaagaggaacagcgataagctgatcgccagaaagaaggactgggaccctaagaagtacggcggcttcgtgagccccaccgtggcctattctgtgctggtggtggccaaagtggaaaagggcaagtccaagaaactgaagagtgtgaaagagctgctggggatcaccatcatggaaagaagcagcttcgagaagaatcccatcgactttctggaagccaagggctacaaagaagtgaaaaaggacctgatcatcaagctgcctaagtactccctgttcgagctggaaaacggccggaagagaatgctggcctctgcccggttcctgcagaagggaaacgaactggccctgccctccaaatatgtgaacttcctgtacctggccagccactatgagaagctgaagggctcccccgaggataatgagcagaaacagctgtttgtggaacagcacaagcactacctggacgagatcatcgagcagatcagcgagttctccaagagagtgatcctggccgacgctaatctggacaaagtgctgtccgcctacaacaagcaccgggataagcccatcagagagcaggccgagaatatcatccacctgtttaccctgaccaatctgggagcccctcgggccttcaagtactttgacaccaccatcgaccggaaggtgtaccggagcaccaaagaggtgctggacgccaccctgatccaccagagcatcaccggcctgtacgagacacggatcgacctgtctcagctgggaggtgacagcggcgggagcggcgggagcggggggagcactaatctgagcgacatcattgagaaggagactgggaaacagctggtcattcaggagtccatcctgatgctgcctgaggaggtggaggaagtgatcggcaacaagccagagtctgacatcctggtgcacaccgcctacgacgagtccacagatgagaatgtgatgctgctgacctctgacgcccccgagtataagccttgggccctggtcatccaggattctaacggcgagaataagatcaagatgctgagcggaggatccggaggatctggaggcagcaccaacctgtctgacatcatcgagaaggagacaggcaagcagctggtcatccaggagagcatcctgatgctgcccgaagaagtcgaagaagtgatcggaaacaagcctgagagcgatatcctggtccataccgcctacgacgagagtaccgacgaaaatgtgatgctgctgacatccgacgccccagagtataagccctgggctctggtcatccaggattccaacggagagaacaaaatcaaaatgctgtctggcggctcaaaaagaaccgccgacggcagcgaattcgagcccaagaagaagaggaaagtctaaccggtcatcatcaccatcaccattgagtttaaacccgctgatcagcctcgactgtgccttctagttgccagccatctgttgtttgcccctcccccgtgccttccttgaccctggaaggtgccactcccactgtcctttcctaataaaatgaggaaattgcatcgcattgtctgagtaggtgtcattctattctggggggtggggtggggcaggacagcaagggggaggattgggaagacaatagcaggcatgctggggatgcggtgggctctatggcttctgaggcggaaagaaccagctggggctcgataccgtcgacctctagctagagcttggcgtaatcatggtcatagctgtttcctgtgtgaaattgttatccgctcacaattccacacaacatacgagccggaagcataaagtgtaaagcctagggtgcctaatgagtgagctaactcacattaattgcgttgcgctcactgcccgctttccagtcgggaaacctgtcgtgccagctgcattaatgaatcggccaacgcgcggggagaggcggtttgcgtattgggcgcacttccgcttcctcgctcactgactcgctgcgctcggtcgttcggctgcggcgagcggtatcagctcactcaaaggcggtaatacggttatccacagaatcaggggataacgcaggaaagaacatgtgagcaaaaggccagcaaaaggccaggaaccgtaaaaaggccgcgttgctggcgtttttccataggctccgcccccctgacgagcatcacaaaaatcgacgctcaagtcagaggtggcgaaacccgacaggactataaagataccaggcgtttccccctggaagctccctcgtgcgctctcctgttccgaccctgccgcttaccggatacctgtccgcctttctcccttcgggaagcgtggcgctttctcatagctcacgctgtaggtatctcagttcggtgtaggtcgttcgctccaagctgggctgtgtgcacgaaccccccgttcagcccgaccgctgcgccttatccggtaactatcgtcttgagtccaacccggtaagacacgacttatcgccactggcagcagccactggtaacaggattagcagagcgaggtatgtaggcggtgctacagagttcttgaagtggtggcctaactacggctacactagaagaacagtatttggtatctgcgctctgctgaagccagttaccttcggaaaaagagttggtagctcttgatccggcaaacaaaccaccgctggtagcggtggtttttttgtttgcaagcagcagattacgcgcagaaaaaaaggatctcaagaagatcctttgatcttttctacggggtctgacactcagtggaacgaaaactcacgttaagggattttggtcatgagattatcaaaaaggatcttcacctagatccttttaaattaaaaatgaagttttaaatcaatctaaagtatatatgagtaaacttggtctgacagttaccaatgcttaatcagtgaggcacctatctcagcgatctgtctatttcgttcatccatagttgcctgactccccgtcgtgtagataactacgatacgggagggcttaccatctggccccagtgctgcaatgataccgcgggacccacgctcaccggctccagatttatcagcaataaaccagccagccggaagggccgagcgcagaagtggtcctgcaactttatccgcctccatccagtctattaattgttgccgggaagctagagtaagtagttcgccagttaatagtttgcgcaacgttgttgccattgctacaggcatcgtggtgtcacgctcgtcgtttggtatggcttcattcagctccggttcccaacgatcaaggcgagttacatgatcccccatgttgtgcaaaaaagcggttagctccttcggtcctccgatcgttgtcagaagtaagttggccgcagtgttatcactcatggttatggcagcactgcataattctcttactgtcatgccatccgtaagatgcttttctgtgactggtgagtactcaaccaagtcattctgagaatagtgtatgcggcgaccgagttgctcttgcccggcgtcaatacgggataataccgcgccacatagcagaactttaaaagtgctcatcattggaaaacgttcttcggggcgaaaactctcaaggatcttaccgctgttgagatccagttcgatgtaacccactcgtgcacccaactgatcttcagcatcttttactttcaccagcgtttctgggtgagcaaaaacaggaaggcaaaatgccgcaaaaaagggaataagggcgacacggaaatgttgaatactcatactcttcctttttcaatattattgaagcatttatcagggttattgtctcatgagcggatacatatttgaatgtatttagaaaaataaacaaataggggttccgcgcacatttccccgaaaagtgccacctgacgtcgacggatcgggagatcgatctcccgatcccctagggtcgactctcagtacaatctgctctgatgccgcatagttaagccagtatctgctccctgcttgtgtgttggaggtcgctgagtagtgcgcgagcaaaatttaagctacaacaaggcaaggcttgaccgacaattgcatgaagaatctgcttagggttaggcgttttgcgctgcttcgcgatgtacgggccagatatacgcgttgacattgattattgac

SEQ ID NO: 3658 - protein, 1853 aa, synthetic construct
MKRTADGSEFESPKKKRKVSSETGPVAVDPTLRRRIEPHEFEVFFDPRELRKETCLLYEINWGGRHSIWRHTSQNTNKHVEVNFIEKFTTERYFCPNTRCSITWFLSWSPCGECSRAITEFLSRYPHVTLFIYIARLYHHADPRNRQGLRDLISSGVTIQIMTEQESGYCWRNFVNYSPSNEAHWPRYPHLWVRLYVLELYCIILGLPPCLNILRRKQPQLTFFTIALQSCHYQRLPPHILWATGLKSGGSSGGSSGSETPGTSESATPESSGGSSGGSDKKYSIGLAIGTNSVGWAVITDEYKVPSKKFKVLGNTDRHSIKKNLIGALLFDSGETAEATRLKRTARRRYTRRKNRICYLQEIFSNEMAKVDDSFFHRLEESFLVEEDKKHERHPIFGNIVDEVAYHEKYPTIYHLRKKLVDSTDKADLRLIYLALAHMIKFRGHFLIEGDLNPDNSDVDKLFIQLVQTYNQLFEENPINASGVDAKAILSARLSKSRRLENLIAQLPGEKKNGLFGNLIALSLGLTPNFKSNFDLAEDAKLQLSKDTYDDDLDNLLAQIGDQYADLFLAAKNLSDAILLSDILRVNTEITKAPLSASMIKRYDEHHQDLTLLKALVRQQLPEKYKEIFFDQSKNGYAGYIDGGASQEEFYKFIKPILEKMDGTEELLVKLNREDLLRKQRTFDNGSIPHQIHLGELHAILRRQEDFYPFLKDNREKIEKILTFRIPYYVGPLARGNSRFAWMTRKSEETITPWNFEEVVDKGASAQSFIERMTNFDKNLPNEKVLPKHSLLYEYFTVYNELTKVKYVTEGMRKPAFLSGEQKKAIVDLLFKTNRKVTVKQLKEDYFKKIECFDSVEISGVEDRFNASLGTYHDLLKIIKDKDFLDNEENEDILEDIVLTLTLFEDREMIEERLKTYAHLFDDKVMKQLKRRRYTGWGRLSRKLINGIRDKQSGKTILDFLKSDGFANRNFMQLIHDDSLTFKEDIQKAQVSGQGDSLHEHIANLAGSPAIKKGILQTVKVVDELVKVMGRHKPENIVIEMARENQTTQKGQKNSRERMKRIEEGIKELGSQILKEHPVENTQLQNEKLYLYYLQNGRDMYVDQELDINRLSDYDVDHIVPQSFLKDDSIDNKVLTRSDKNRGKSDNVPSEEVVKKMKNYWRQLLNAKLITQRKFDNLTKAERGGLSELDKAGFIKRQLVETRQITKHVAQILDSRMNTKYDENDKLIREVKVITLKSKLVSDFRKDFQFYKVREINNYHHAHDAYLNAVVGTALIKKYPKLESEFVYGDYKVYDVRKMIAKSEQEIGKATAKYFFYSNIMNFFKTEITLANGEIRKRPLIETNGETGEIVWDKGRDFATVRKVLSMPQVNIVKKTEVQTGGFSKESILPKRNSDKLIARKKDWDPKKYGGFDSPTVAYSVLVVAKVEKGKSKKLKSVKELLGITIMERSSFEKNPIDFLEAKGYKEVKKDLIIKLPKYSLFELENGRKRMLASAGELQKGNELALPSKYVNFLYLASHYEKLKGSPEDNEQKQLFVEQHKHYLDEIIEQISEFSKRVILADANLDKVLSAYNKHRDKPIREQAENIIHLFTLTNLGAPAAFKYFDTTIDRKRYTSTKEVLDATLIHQSITGLYETRIDLSQLGGDSGGSGGSGGSTNLSDIIEKETGKQLVIQESILMLPEEVEEVIGNKPESDILVHTAYDESTDENVMLLTSDAPEYKPWALVIQDSNGENKIKMLSGGSGGSGGSTNLSDIIEKETGKQLVIQESILMLPEEVEEVIGNKPESDILVHTAYDESTDENVMLLTSDAPEYKPWALVIQDSNGENKIKMLSGGSKRTADGSEFEPKKKRKV

SEQ ID NO: 3659 - protein, 1853 aa, synthetic construct
MKRTADGSEFESPKKKRKVSSETGPVAVDPTLRRRIEPHEFEVFFDPRELRKETCLLYEINWGGRHSIWRHTSQNTNKHVEVNFIEKFTTERYFCPNTRCSITWFLSYSPCGECSRAITEFLSRYPHVTLFIYIARLYHHADPENRQGLRDLISSGVTIQIMTEQESGYCWRNFVNYSPSNEAHWPRYPHLWVRLYVLELYCIILGLPPCLNILRRKQPQLTFFTIALQSCHYQRLPPHILWATGLKSGGSSGGSSGSETPGTSESATPESSGGSSGGSDKKYSIGLAIGTNSVGWAVITDEYKVPSKKFKVLGNTDRHSIKKNLIGALLFDSGETAEATRLKRTARRRYTRRKNRICYLQEIFSNEMAKVDDSFFHRLEESFLVEEDKKHERHPIFGNIVDEVAYHEKYPTIYHLRKKLVDSTDKADLRLIYLALAHMIKFRGHFLIEGDLNPDNSDVDKLFIQLVQTYNQLFEENPINASGVDAKAILSARLSKSRRLENLIAQLPGEKKNGLFGNLIALSLGLTPNFKSNFDLAEDAKLQLSKDTYDDDLDNLLAQIGDQYADLFLAAKNLSDAILLSDILRVNTEITKAPLSASMIKRYDEHHQDLTLLKALVRQQLPEKYKEIFFDQSKNGYAGYIDGGASQEEFYKFIKPILEKMDGTEELLVKLNREDLLRKQRTFDNGSIPHQIHLGELHAILRRQEDFYPFLKDNREKIEKILTFRIPYYVGPLARGNSRFAWMTRKSEETITPWNFEEVVDKGASAQSFIERMTNFDKNLPNEKVLPKHSLLYEYFTVYNELTKVKYVTEGMRKPAFLSGEQKKAIVDLLFKTNRKVTVKQLKEDYFKKIECFDSVEISGVEDRFNASLGTYHDLLKIIKDKDFLDNEENEDILEDIVLTLTLFEDREMIEERLKTYAHLFDDKVMKQLKRRRYTGWGRLSRKLINGIRDKQSGKTILDFLKSDGFANRNFMQLIHDDSLTFKEDIQKAQVSGQGDSLHEHIANLAGSPAIKKGILQTVKVVDELVKVMGRHKPENIVIEMARENQTTQKGQKNSRERMKRIEEGIKELGSQILKEHPVENTQLQNEKLYLYYLQNGRDMYVDQELDINRLSDYDVDHIVPQSFLKDDSIDNKVLTRSDKNRGKSDNVPSEEVVKKMKNYWRQLLNAKLITQRKFDNLTKAERGGLSELDKAGFIKRQLVETRQITKHVAQILDSRMNTKYDENDKLIREVKVITLKSKLVSDFRKDFQFYKVREINNYHHAHDAYLNAVVGTALIKKYPKLESEFVYGDYKVYDVRKMIAKSEQEIGKATAKYFFYSNIMNFFKTEITLANGEIRKRPLIETNGETGEIVWDKGRDFATVRKVLSMPQVNIVKKTEVQTGGFSKESILPKRNSDKLIARKKDWDPKKYGGFDSPTVAYSVLVVAKVEKGKSKKLKSVKELLGITIMERSSFEKNPIDFLEAKGYKEVKKDLIIKLPKYSLFELENGRKRMLASAGELQKGNELALPSKYVNFLYLASHYEKLKGSPEDNEQKQLFVEQHKHYLDEIIEQISEFSKRVILADANLDKVLSAYNKHRDKPIREQAENIIHLFTLTNLGAPAAFKYFDTTIDRKRYTSTKEVLDATLIHQSITGLYETRIDLSQLGGDSGGSGGSGGSTNLSDIIEKETGKQLVIQESILMLPEEVEEVIGNKPESDILVHTAYDESTDENVMLLTSDAPEYKPWALVIQDSNGENKIKMLSGGSGGSGGSTNLSDIIEKETGKQLVIQESILMLPEEVEEVIGNKPESDILVHTAYDESTDENVMLLTSDAPEYKPWALVIQDSNGENKIKMLSGGSKRTADGSEFEPKKKRKV

SEQ ID NO: 3660 - protein, 1853 aa, synthetic construct
MKRTADGSEFESPKKKRKVSSETGPVAVDPTLRRRIEPHEFEVFFDPRELRKETCLLYEINWGGRHSIWRHTSQNTNKHVEVNFIEKFTTERYFCPNTRCSITWFLSYSPCGECSRAITEFLSRYPHVTLFIYIARLYHHADPRNRQGLEDLISSGVTIQIMTEQESGYCWRNFVNYSPSNEAHWPRYPHLWVRLYVLELYCIILGLPPCLNILRRKQPQLTFFTIALQSCHYQRLPPHILWATGLKSGGSSGGSSGSETPGTSESATPESSGGSSGGSDKKYSIGLAIGTNSVGWAVITDEYKVPSKKFKVLGNTDRHSIKKNLIGALLFDSGETAEATRLKRTARRRYTRRKNRICYLQEIFSNEMAKVDDSFFHRLEESFLVEEDKKHERHPIFGNIVDEVAYHEKYPTIYHLRKKLVDSTDKADLRLIYLALAHMIKFRGHFLIEGDLNPDNSDVDKLFIQLVQTYNQLFEENPINASGVDAKAILSARLSKSRRLENLIAQLPGEKKNGLFGNLIALSLGLTPNFKSNFDLAEDAKLQLSKDTYDDDLDNLLAQIGDQYADLFLAAKNLSDAILLSDILRVNTEITKAPLSASMIKRYDEHHQDLTLLKALVRQQLPEKYKEIFFDQSKNGYAGYIDGGASQEEFYKFIKPILEKMDGTEELLVKLNREDLLRKQRTFDNGSIPHQIHLGELHAILRRQEDFYPFLKDNREKIEKILTFRIPYYVGPLARGNSRFAWMTRKSEETITPWNFEEVVDKGASAQSFIERMTNFDKNLPNEKVLPKHSLLYEYFTVYNELTKVKYVTEGMRKPAFLSGEQKKAIVDLLFKTNRKVTVKQLKEDYFKKIECFDSVEISGVEDRFNASLGTYHDLLKIIKDKDFLDNEENEDILEDIVLTLTLFEDREMIEERLKTYAHLFDDKVMKQLKRRRYTGWGRLSRKLINGIRDKQSGKTILDFLKSDGFANRNFMQLIHDDSLTFKEDIQKAQVSGQGDSLHEHIANLAGSPAIKKGILQTVKVVDELVKVMGRHKPENIVIEMARENQTTQKGQKNSRERMKRIEEGIKELGSQILKEHPVENTQLQNEKLYLYYLQNGRDMYVDQELDINRLSDYDVDHIVPQSFLKDDSIDNKVLTRSDKNRGKSDNVPSEEVVKKMKNYWRQLLNAKLITQRKFDNLTKAERGGLSELDKAGFIKRQLVETRQITKHVAQILDSRMNTKYDENDKLIREVKVITLKSKLVSDFRKDFQFYKVREINNYHHAHDAYLNAVVGTALIKKYPKLESEFVYGDYKVYDVRKMIAKSEQEIGKATAKYFFYSNIMNFFKTEITLANGEIRKRPLIETNGETGEIVWDKGRDFATVRKVLSMPQVNIVKKTEVQTGGFSKESILPKRNSDKLIARKKDWDPKKYGGFDSPTVAYSVLVVAKVEKGKSKKLKSVKELLGITIMERSSFEKNPIDFLEAKGYKEVKKDLIIKLPKYSLFELENGRKRMLASAGELQKGNELALPSKYVNFLYLASHYEKLKGSPEDNEQKQLFVEQHKHYLDEIIEQISEFSKRVILADANLDKVLSAYNKHRDKPIREQAENIIHLFTLTNLGAPAAFKYFDTTIDRKRYTSTKEVLDATLIHQSITGLYETRIDLSQLGGDSGGSGGSGGSTNLSDIIEKETGKQLVIQESILMLPEEVEEVIGNKPESDILVHTAYDESTDENVMLLTSDAPEYKPWALVIQDSNGENKIKMLSGGSGGSGGSTNLSDIIEKETGKQLVIQESILMLPEEVEEVIGNKPESDILVHTAYDESTDENVMLLTSDAPEYKPWALVIQDSNGENKIKMLSGGSKRTADGSEFEPKKKRKV

SEQ ID NO: 3661 - protein, 1853 aa, synthetic construct
MKRTADGSEFESPKKKRKVSSETGPVAVDPTLRRRIEPHEFEVFFDPRELRKETCLLYEINWGGRHSIWRHTSQNTNKHVEVNFIEKFTTERYFCPNTRCSITWFLSYSPCGECSRAITEFLSRYPHVTLFIYIARLYHHADPENRQGLEDLISSGVTIQIMTEQESGYCWRNFVNYSPSNEAHWPRYPHLWVRLYVLELYCIILGLPPCLNILRRKQPQLTFFTIALQSCHYQRLPPHILWATGLKSGGSSGGSSGSETPGTSESATPESSGGSSGGSDKKYSIGLAIGTNSVGWAVITDEYKVPSKKFKVLGNTDRHSIKKNLIGALLFDSGETAEATRLKRTARRRYTRRKNRICYLQEIFSNEMAKVDDSFFHRLEESFLVEEDKKHERHPIFGNIVDEVAYHEKYPTIYHLRKKLVDSTDKADLRLIYLALAHMIKFRGHFLIEGDLNPDNSDVDKLFIQLVQTYNQLFEENPINASGVDAKAILSARLSKSRRLENLIAQLPGEKKNGLFGNLIALSLGLTPNFKSNFDLAEDAKLQLSKDTYDDDLDNLLAQIGDQYADLFLAAKNLSDAILLSDILRVNTEITKAPLSASMIKRYDEHHQDLTLLKALVRQQLPEKYKEIFFDQSKNGYAGYIDGGASQEEFYKFIKPILEKMDGTEELLVKLNREDLLRKQRTFDNGSIPHQIHLGELHAILRRQEDFYPFLKDNREKIEKILTFRIPYYVGPLARGNSRFAWMTRKSEETITPWNFEEVVDKGASAQSFIERMTNFDKNLPNEKVLPKHSLLYEYFTVYNELTKVKYVTEGMRKPAFLSGEQKKAIVDLLFKTNRKVTVKQLKEDYFKKIECFDSVEISGVEDRFNASLGTYHDLLKIIKDKDFLDNEENEDILEDIVLTLTLFEDREMIEERLKTYAHLFDDKVMKQLKRRRYTGWGRLSRKLINGIRDKQSGKTILDFLKSDGFANRNFMQLIHDDSLTFKEDIQKAQVSGQGDSLHEHIANLAGSPAIKKGILQTVKVVDELVKVMGRHKPENIVIEMARENQTTQKGQKNSRERMKRIEEGIKELGSQILKEHPVENTQLQNEKLYLYYLQNGRDMYVDQELDINRLSDYDVDHIVPQSFLKDDSIDNKVLTRSDKNRGKSDNVPSEEVVKKMKNYWRQLLNAKLITQRKFDNLTKAERGGLSELDKAGFIKRQLVETRQITKHVAQILDSRMNTKYDENDKLIREVKVITLKSKLVSDFRKDFQFYKVREINNYHHAHDAYLNAVVGTALIKKYPKLESEFVYGDYKVYDVRKMIAKSEQEIGKATAKYFFYSNIMNFFKTEITLANGEIRKRPLIETNGETGEIVWDKGRDFATVRKVLSMPQVNIVKKTEVQTGGFSKESILPKRNSDKLIARKKDWDPKKYGGFDSPTVAYSVLVVAKVEKGKSKKLKSVKELLGITIMERSSFEKNPIDFLEAKGYKEVKKDLIIKLPKYSLFELENGRKRMLASAGELQKGNELALPSKYVNFLYLASHYEKLKGSPEDNEQKQLFVEQHKHYLDEIIEQISEFSKRVILADANLDKVLSAYNKHRDKPIREQAENIIHLFTLTNLGAPAAFKYFDTTIDRKRYTSTKEVLDATLIHQSITGLYETRIDLSQLGGDSGGSGGSGGSTNLSDIIEKETGKQLVIQESILMLPEEVEEVIGNKPESDILVHTAYDESTDENVMLLTSDAPEYKPWALVIQDSNGENKIKMLSGGSGGSGGSTNLSDIIEKETGKQLVIQESILMLPEEVEEVIGNKPESDILVHTAYDESTDENVMLLTSDAPEYKPWALVIQDSNGENKIKMLSGGSKRTADGSEFEPKKKRKV

SEQ ID NO: 3662 - protein, 1853 aa, synthetic construct
MKRTADGSEFESPKKKRKVSSETGPVAVDPTLRRRIEPHEFEVFFDPRELRKETCLLYEINWGGRHSIWRHTSQNTNKHVEVNFIEKFTTERYFCPNTRCSITWFLSWSPCGECSRAITEFLSRYPHVTLFIYIARLYHHADPENRQGLEDLISSGVTIQIMTEQESGYCWRNFVNYSPSNEAHWPRYPHLWVRLYVLELYCIILGLPPCLNILRRKQPQLTFFTIALQSCHYQRLPPHILWATGLKSGGSSGGSSGSETPGTSESATPESSGGSSGGSDKKYSIGLAIGTNSVGWAVITDEYKVPSKKFKVLGNTDRHSIKKNLIGALLFDSGETAEATRLKRTARRRYTRRKNRICYLQEIFSNEMAKVDDSFFHRLEESFLVEEDKKHERHPIFGNIVDEVAYHEKYPTIYHLRKKLVDSTDKADLRLIYLALAHMIKFRGHFLIEGDLNPDNSDVDKLFIQLVQTYNQLFEENPINASGVDAKAILSARLSKSRRLENLIAQLPGEKKNGLFGNLIALSLGLTPNFKSNFDLAEDAKLQLSKDTYDDDLDNLLAQIGDQYADLFLAAKNLSDAILLSDILRVNTEITKAPLSASMIKRYDEHHQDLTLLKALVRQQLPEKYKEIFFDQSKNGYAGYIDGGASQEEFYKFIKPILEKMDGTEELLVKLNREDLLRKQRTFDNGSIPHQIHLGELHAILRRQEDFYPFLKDNREKIEKILTFRIPYYVGPLARGNSRFAWMTRKSEETITPWNFEEVVDKGASAQSFIERMTNFDKNLPNEKVLPKHSLLYEYFTVYNELTKVKYVTEGMRKPAFLSGEQKKAIVDLLFKTNRKVTVKQLKEDYFKKIECFDSVEISGVEDRFNASLGTYHDLLKIIKDKDFLDNEENEDILEDIVLTLTLFEDREMIEERLKTYAHLFDDKVMKQLKRRRYTGWGRLSRKLINGIRDKQSGKTILDFLKSDGFANRNFMQLIHDDSLTFKEDIQKAQVSGQGDSLHEHIANLAGSPAIKKGILQTVKVVDELVKVMGRHKPENIVIEMARENQTTQKGQKNSRERMKRIEEGIKELGSQILKEHPVENTQLQNEKLYLYYLQNGRDMYVDQELDINRLSDYDVDHIVPQSFLKDDSIDNKVLTRSDKNRGKSDNVPSEEVVKKMKNYWRQLLNAKLITQRKFDNLTKAERGGLSELDKAGFIKRQLVETRQITKHVAQILDSRMNTKYDENDKLIREVKVITLKSKLVSDFRKDFQFYKVREINNYHHAHDAYLNAVVGTALIKKYPKLESEFVYGDYKVYDVRKMIAKSEQEIGKATAKYFFYSNIMNFFKTEITLANGEIRKRPLIETNGETGEIVWDKGRDFATVRKVLSMPQVNIVKKTEVQTGGFSKESILPKRNSDKLIARKKDWDPKKYGGFDSPTVAYSVLVVAKVEKGKSKKLKSVKELLGITIMERSSFEKNPIDFLEAKGYKEVKKDLIIKLPKYSLFELENGRKRMLASAGELQKGNELALPSKYVNFLYLASHYEKLKGSPEDNEQKQLFVEQHKHYLDEIIEQISEFSKRVILADANLDKVLSAYNKHRDKPIREQAENIIHLFTLTNLGAPAAFKYFDTTIDRKRYTSTKEVLDATLIHQSITGLYETRIDLSQLGGDSGGSGGSGGSTNLSDIIEKETGKQLVIQESILMLPEEVEEVIGNKPESDILVHTAYDESTDENVMLLTSDAPEYKPWALVIQDSNGENKIKMLSGGSGGSGGSTNLSDIIEKETGKQLVIQESILMLPEEVEEVIGNKPESDILVHTAYDESTDENVMLLTSDAPEYKPWALVIQDSNGENKIKMLSGGSKRTADGSEFEPKKKRKV

SEQ ID NO: 3663 - protein, 1853 aa, synthetic construct
MKRTADGSEFESPKKKRKVSSETGPVAVDPTLRRRIEPHEFEVFFDPRELAKETCLLYEINWGGRHSIWRHTSQNTNKHVEVNFIEKFTTERYFCPNTRCSITWFLSWSPCGECSRAITEFLSRYPHVTLFIYIARLYHHADPRNRQGLRDLISSGVTIQIMTEQESGYCWRNFVNYSPSNEAHWPRYPHLWVRLYVLELYCIILGLPPCLNILRRKQPQLTFFTIALQSCHYQRLPPHILWATGLKSGGSSGGSSGSETPGTSESATPESSGGSSGGSDKKYSIGLAIGTNSVGWAVITDEYKVPSKKFKVLGNTDRHSIKKNLIGALLFDSGETAEATRLKRTARRRYTRRKNRICYLQEIFSNEMAKVDDSFFHRLEESFLVEEDKKHERHPIFGNIVDEVAYHEKYPTIYHLRKKLVDSTDKADLRLIYLALAHMIKFRGHFLIEGDLNPDNSDVDKLFIQLVQTYNQLFEENPINASGVDAKAILSARLSKSRRLENLIAQLPGEKKNGLFGNLIALSLGLTPNFKSNFDLAEDAKLQLSKDTYDDDLDNLLAQIGDQYADLFLAAKNLSDAILLSDILRVNTEITKAPLSASMIKRYDEHHQDLTLLKALVRQQLPEKYKEIFFDQSKNGYAGYIDGGASQEEFYKFIKPILEKMDGTEELLVKLNREDLLRKQRTFDNGSIPHQIHLGELHAILRRQEDFYPFLKDNREKIEKILTFRIPYYVGPLARGNSRFAWMTRKSEETITPWNFEEVVDKGASAQSFIERMTNFDKNLPNEKVLPKHSLLYEYFTVYNELTKVKYVTEGMRKPAFLSGEQKKAIVDLLFKTNRKVTVKQLKEDYFKKIECFDSVEISGVEDRFNASLGTYHDLLKIIKDKDFLDNEENEDILEDIVLTLTLFEDREMIEERLKTYAHLFDDKVMKQLKRRRYTGWGRLSRKLINGIRDKQSGKTILDFLKSDGFANRNFMQLIHDDSLTFKEDIQKAQVSGQGDSLHEHIANLAGSPAIKKGILQTVKVVDELVKVMGRHKPENIVIEMARENQTTQKGQKNSRERMKRIEEGIKELGSQILKEHPVENTQLQNEKLYLYYLQNGRDMYVDQELDINRLSDYDVDHIVPQSFLKDDSIDNKVLTRSDKNRGKSDNVPSEEVVKKMKNYWRQLLNAKLITQRKFDNLTKAERGGLSELDKAGFIKRQLVETRQITKHVAQILDSRMNTKYDENDKLIREVKVITLKSKLVSDFRKDFQFYKVREINNYHHAHDAYLNAVVGTALIKKYPKLESEFVYGDYKVYDVRKMIAKSEQEIGKATAKYFFYSNIMNFFKTEITLANGEIRKRPLIETNGETGEIVWDKGRDFATVRKVLSMPQVNIVKKTEVQTGGFSKESILPKRNSDKLIARKKDWDPKKYGGFDSPTVAYSVLVVAKVEKGKSKKLKSVKELLGITIMERSSFEKNPIDFLEAKGYKEVKKDLIIKLPKYSLFELENGRKRMLASAGELQKGNELALPSKYVNFLYLASHYEKLKGSPEDNEQKQLFVEQHKHYLDEIIEQISEFSKRVILADANLDKVLSAYNKHRDKPIREQAENIIHLFTLTNLGAPAAFKYFDTTIDRKRYTSTKEVLDATLIHQSITGLYETRIDLSQLGGDSGGSGGSGGSTNLSDIIEKETGKQLVIQESILMLPEEVEEVIGNKPESDILVHTAYDESTDENVMLLTSDAPEYKPWALVIQDSNGENKIKMLSGGSGGSGGSTNLSDIIEKETGKQLVIQESILMLPEEVEEVIGNKPESDILVHTAYDESTDENVMLLTSDAPEYKPWALVIQDSNGENKIKMLSGGSKRTADGSEFEPKKKRKV

SEQ ID NO: 3664 - protein, 1853 aa, synthetic construct
MKRTADGSEFESPKKKRKVSSETGPVAVDPTLRRRIEPHEFEVFFDPRELAAETCLLYEINWGGRHSIWRHTSQNTNKHVEVNFIEKFTTERYFCPNTRCSITWFLSWSPCGECSRAITEFLSRYPHVTLFIYIARLYHHADPRNRQGLRDLISSGVTIQIMTEQESGYCWRNFVNYSPSNEAHWPRYPHLWVRLYVLELYCIILGLPPCLNILRRKQPQLTFFTIALQSCHYQRLPPHILWATGLKSGGSSGGSSGSETPGTSESATPESSGGSSGGSDKKYSIGLAIGTNSVGWAVITDEYKVPSKKFKVLGNTDRHSIKKNLIGALLFDSGETAEATRLKRTARRRYTRRKNRICYLQEIFSNEMAKVDDSFFHRLEESFLVEEDKKHERHPIFGNIVDEVAYHEKYPTIYHLRKKLVDSTDKADLRLIYLALAHMIKFRGHFLIEGDLNPDNSDVDKLFIQLVQTYNQLFEENPINASGVDAKAILSARLSKSRRLENLIAQLPGEKKNGLFGNLIALSLGLTPNFKSNFDLAEDAKLQLSKDTYDDDLDNLLAQIGDQYADLFLAAKNLSDAILLSDILRVNTEITKAPLSASMIKRYDEHHQDLTLLKALVRQQLPEKYKEIFFDQSKNGYAGYIDGGASQEEFYKFIKPILEKMDGTEELLVKLNREDLLRKQRTFDNGSIPHQIHLGELHAILRRQEDFYPFLKDNREKIEKILTFRIPYYVGPLARGNSRFAWMTRKSEETITPWNFEEVVDKGASAQSFIERMTNFDKNLPNEKVLPKHSLLYEYFTVYNELTKVKYVTEGMRKPAFLSGEQKKAIVDLLFKTNRKVTVKQLKEDYFKKIECFDSVEISGVEDRFNASLGTYHDLLKIIKDKDFLDNEENEDILEDIVLTLTLFEDREMIEERLKTYAHLFDDKVMKQLKRRRYTGWGRLSRKLINGIRDKQSGKTILDFLKSDGFANRNFMQLIHDDSLTFKEDIQKAQVSGQGDSLHEHIANLAGSPAIKKGILQTVKVVDELVKVMGRHKPENIVIEMARENQTTQKGQKNSRERMKRIEEGIKELGSQILKEHPVENTQLQNEKLYLYYLQNGRDMYVDQELDINRLSDYDVDHIVPQSFLKDDSIDNKVLTRSDKNRGKSDNVPSEEVVKKMKNYWRQLLNAKLITQRKFDNLTKAERGGLSELDKAGFIKRQLVETRQITKHVAQILDSRMNTKYDENDKLIREVKVITLKSKLVSDFRKDFQFYKVREINNYHHAHDAYLNAVVGTALIKKYPKLESEFVYGDYKVYDVRKMIAKSEQEIGKATAKYFFYSNIMNFFKTEITLANGEIRKRPLIETNGETGEIVWDKGRDFATVRKVLSMPQVNIVKKTEVQTGGFSKESILPKRNSDKLIARKKDWDPKKYGGFDSPTVAYSVLVVAKVEKGKSKKLKSVKELLGITIMERSSFEKNPIDFLEAKGYKEVKKDLIIKLPKYSLFELENGRKRMLASAGELQKGNELALPSKYVNFLYLASHYEKLKGSPEDNEQKQLFVEQHKHYLDEIIEQISEFSKRVILADANLDKVLSAYNKHRDKPIREQAENIIHLFTLTNLGAPAAFKYFDTTIDRKRYTSTKEVLDATLIHQSITGLYETRIDLSQLGGDSGGSGGSGGSTNLSDIIEKETGKQLVIQESILMLPEEVEEVIGNKPESDILVHTAYDESTDENVMLLTSDAPEYKPWALVIQDSNGENKIKMLSGGSGGSGGSTNLSDIIEKETGKQLVIQESILMLPEEVEEVIGNKPESDILVHTAYDESTDENVMLLTSDAPEYKPWALVIQDSNGENKIKMLSGGSKRTADGSEFEPKKKRKV

SEQ ID NO: 3665 - protein, 1824 aa, synthetic construct
MKRTADGSEFESPKKKRKVSEASPASGPRHLMDPHIFTSNFNNGIGRHKTYLCYEVERLDNGTSVKMDQHRGFLHNQAKNLLCGFYGRHAELRFLDLVPSLQLDPAQIYRVTWFISWSPCFSWGCAGEVRAFLQENTHVRLRIFAARIYDYDPLYKEALQMLRDAGAQVSIMTYDEFKHCWDTFVDHQGCPFQPWDGLDEHSQALSGRLRAILQNQGNSGGSSGGSSGSETPGTSESATPESSGGSSGGSDKKYSIGLAIGTNSVGWAVITDEYKVPSKKFKVLGNTDRHSIKKNLIGALLFDSGETAEATRLKRTARRRYTRRKNRICYLQEIFSNEMAKVDDSFFHRLEESFLVEEDKKHERHPIFGNIVDEVAYHEKYPTIYHLRKKLVDSTDKADLRLIYLALAHMIKFRGHFLIEGDLNPDNSDVDKLFIQLVQTYNQLFEENPINASGVDAKAILSARLSKSRRLENLIAQLPGEKKNGLFGNLIALSLGLTPNFKSNFDLAEDAKLQLSKDTYDDDLDNLLAQIGDQYADLFLAAKNLSDAILLSDILRVNTEITKAPLSASMIKRYDEHHQDLTLLKALVRQQLPEKYKEIFFDQSKNGYAGYIDGGASQEEFYKFIKPILEKMDGTEELLVKLNREDLLRKQRTFDNGSIPHQIHLGELHAILRRQEDFYPFLKDNREKIEKILTFRIPYYVGPLARGNSRFAWMTRKSEETITPWNFEEVVDKGASAQSFIERMTNFDKNLPNEKVLPKHSLLYEYFTVYNELTKVKYVTEGMRKPAFLSGEQKKAIVDLLFKTNRKVTVKQLKEDYFKKIECFDSVEISGVEDRFNASLGTYHDLLKIIKDKDFLDNEENEDILEDIVLTLTLFEDREMIEERLKTYAHLFDDKVMKQLKRRRYTGWGRLSRKLINGIRDKQSGKTILDFLKSDGFANRNFMQLIHDDSLTFKEDIQKAQVSGQGDSLHEHIANLAGSPAIKKGILQTVKVVDELVKVMGRHKPENIVIEMARENQTTQKGQKNSRERMKRIEEGIKELGSQILKEHPVENTQLQNEKLYLYYLQNGRDMYVDQELDINRLSDYDVDHIVPQSFLKDDSIDNKVLTRSDKNRGKSDNVPSEEVVKKMKNYWRQLLNAKLITQRKFDNLTKAERGGLSELDKAGFIKRQLVETRQITKHVAQILDSRMNTKYDENDKLIREVKVITLKSKLVSDFRKDFQFYKVREINNYHHAHDAYLNAVVGTALIKKYPKLESEFVYGDYKVYDVRKMIAKSEQEIGKATAKYFFYSNIMNFFKTEITLANGEIRKRPLIETNGETGEIVWDKGRDFATVRKVLSMPQVNIVKKTEVQTGGFSKESILPKRNSDKLIARKKDWDPKKYGGFDSPTVAYSVLVVAKVEKGKSKKLKSVKELLGITIMERSSFEKNPIDFLEAKGYKEVKKDLIIKLPKYSLFELENGRKRMLASAGELQKGNELALPSKYVNFLYLASHYEKLKGSPEDNEQKQLFVEQHKHYLDEIIEQISEFSKRVILADANLDKVLSAYNKHRDKPIREQAENIIHLFTLTNLGAPAAFKYFDTTIDRKRYTSTKEVLDATLIHQSITGLYETRIDLSQLGGDSGGSGGSGGSTNLSDIIEKETGKQLVIQESILMLPEEVEEVIGNKPESDILVHTAYDESTDENVMLLTSDAPEYKPWALVIQDSNGENKIKMLSGGSGGSGGSTNLSDIIEKETGKQLVIQESILMLPEEVEEVIGNKPESDILVHTAYDESTDENVMLLTSDAPEYKPWALVIQDSNGENKIKMLSGGSKRTADGSEFEPKKKRKV

SEQ ID NO: 3666 - protein, 2006 aa, synthetic construct
MKRTADGSEFESPKKKRKVNPQIRNPMERMYRDTFYDNFENEPILYGRSYTWLCYEVKIKRGRSNLLWDTGVFRGQVYFKPQYHAEMCFLSWFCGNQLPAYKCFQITWFVSWTPCPDCVAKLAEFLSEHPNVTLTISAARLYYYWERDYRRALCRLSQAGARVTIMDYEEFAYCWENFVYNEGQQFMPWYKFDENYAFLHRTLKEILRYLMDPDTFTFNFNNDPLVLRRRQTYLCYEVERLDNGTWVLMDQHMGFLCNEAKNLLCGFYGRHAELRFLDLVPSLQLDPAQIYRVTWFISWSPCFSWGCAGEVRAFLQENTHVRLRIFAARIYDYDPLYKEALQMLRDAGAQVSIMTYDEFEYCWDTFVYRQGCPFQPWDGLEEHSQALSGRLRAILQNQGNSGGSSGGSSGSETPGTSESATPESSGGSSGGSDKKYSIGLAIGTNSVGWAVITDEYKVPSKKFKVLGNTDRHSIKKNLIGALLFDSGETAEATRLKRTARRRYTRRKNRICYLQEIFSNEMAKVDDSFFHRLEESFLVEEDKKHERHPIFGNIVDEVAYHEKYPTIYHLRKKLVDSTDKADLRLIYLALAHMIKFRGHFLIEGDLNPDNSDVDKLFIQLVQTYNQLFEENPINASGVDAKAILSARLSKSRRLENLIAQLPGEKKNGLFGNLIALSLGLTPNFKSNFDLAEDAKLQLSKDTYDDDLDNLLAQIGDQYADLFLAAKNLSDAILLSDILRVNTEITKAPLSASMIKRYDEHHQDLTLLKALVRQQLPEKYKEIFFDQSKNGYAGYIDGGASQEEFYKFIKPILEKMDGTEELLVKLNREDLLRKQRTFDNGSIPHQIHLGELHAILRRQEDFYPFLKDNREKIEKILTFRIPYYVGPLARGNSRFAWMTRKSEETITPWNFEEVVDKGASAQSFIERMTNFDKNLPNEKVLPKHSLLYEYFTVYNELTKVKYVTEGMRKPAFLSGEQKKAIVDLLFKTNRKVTVKQLKEDYFKKIECFDSVEISGVEDRFNASLGTYHDLLKIIKDKDFLDNEENEDILEDIVLTLTLFEDREMIEERLKTYAHLFDDKVMKQLKRRRYTGWGRLSRKLINGIRDKQSGKTILDFLKSDGFANRNFMQLIHDDSLTFKEDIQKAQVSGQGDSLHEHIANLAGSPAIKKGILQTVKVVDELVKVMGRHKPENIVIEMARENQTTQKGQKNSRERMKRIEEGIKELGSQILKEHPVENTQLQNEKLYLYYLQNGRDMYVDQELDINRLSDYDVDHIVPQSFLKDDSIDNKVLTRSDKNRGKSDNVPSEEVVKKMKNYWRQLLNAKLITQRKFDNLTKAERGGLSELDKAGFIKRQLVETRQITKHVAQILDSRMNTKYDENDKLIREVKVITLKSKLVSDFRKDFQFYKVREINNYHHAHDAYLNAVVGTALIKKYPKLESEFVYGDYKVYDVRKMIAKSEQEIGKATAKYFFYSNIMNFFKTEITLANGEIRKRPLIETNGETGEIVWDKGRDFATVRKVLSMPQVNIVKKTEVQTGGFSKESILPKRNSDKLIARKKDWDPKKYGGFDSPTVAYSVLVVAKVEKGKSKKLKSVKELLGITIMERSSFEKNPIDFLEAKGYKEVKKDLIIKLPKYSLFELENGRKRMLASAGELQKGNELALPSKYVNFLYLASHYEKLKGSPEDNEQKQLFVEQHKHYLDEIIEQISEFSKRVILADANLDKVLSAYNKHRDKPIREQAENIIHLFTLTNLGAPAAFKYFDTTIDRKRYTSTKEVLDATLIHQSITGLYETRIDLSQLGGDSGGSGGSGGSTNLSDIIEKETGKQLVIQESILMLPEEVEEVIGNKPESDILVHTAYDESTDENVMLLTSDAPEYKPWALVIQDSNGENKIKMLSGGSGGSGGSTNLSDIIEKETGKQLVIQESILMLPEEVEEVIGNKPESDILVHTAYDESTDENVMLLTSDAPEYKPWALVIQDSNGENKIKMLSGGSKRTADGSEFEPKKKRKV

SEQ ID NO: 3667 - protein, 2008 aa, synthetic construct
MKRTADGSEFESPKKKRKVKPHFRNTVERMYRDTFSYNFYNRPILSRRNTVWLCYEVKTKGPSRPPLDAKIFRGQVYSELKYHPEMRFFHWFSKWRKLHRDQEYEVTWYISWSPCTKCTRDMATFLAEDPKVTLTIFVARLYYFWDPDYQEALRSLCQKRDGPRATMKIMNYDEFQHCWSKFVYSQRELFEPWNNLPKYYILLHIMLGEILRHSMDPPTFTFNFNNEPWVRGRHETYLCYEVERMHNDTWVLLNQRRGFLCNQAPHKHGFLEGRHAELCFLDVIPFWKLDLDQDYRVTCFTSWSPCFSCAQEMAKFISKNKHVSLCIFTARIYDDQGRCQEGLRTLAEAGAKISIMTYSEFKHCWDTFVDHQGCPFQPWDGLDEHSQDLSGRLRAILQNQENSGGSSGGSSGSETPGTSESATPESSGGSSGGSDKKYSIGLAIGTNSVGWAVITDEYKVPSKKFKVLGNTDRHSIKKNLIGALLFDSGETAEATRLKRTARRRYTRRKNRICYLQEIFSNEMAKVDDSFFHRLEESFLVEEDKKHERHPIFGNIVDEVAYHEKYPTIYHLRKKLVDSTDKADLRLIYLALAHMIKFRGHFLIEGDLNPDNSDVDKLFIQLVQTYNQLFEENPINASGVDAKAILSARLSKSRRLENLIAQLPGEKKNGLFGNLIALSLGLTPNFKSNFDLAEDAKLQLSKDTYDDDLDNLLAQIGDQYADLFLAAKNLSDAILLSDILRVNTEITKAPLSASMIKRYDEHHQDLTLLKALVRQQLPEKYKEIFFDQSKNGYAGYIDGGASQEEFYKFIKPILEKMDGTEELLVKLNREDLLRKQRTFDNGSIPHQIHLGELHAILRRQEDFYPFLKDNREKIEKILTFRIPYYVGPLARGNSRFAWMTRKSEETITPWNFEEVVDKGASAQSFIERMTNFDKNLPNEKVLPKHSLLYEYFTVYNELTKVKYVTEGMRKPAFLSGEQKKAIVDLLFKTNRKVTVKQLKEDYFKKIECFDSVEISGVEDRFNASLGTYHDLLKIIKDKDFLDNEENEDILEDIVLTLTLFEDREMIEERLKTYAHLFDDKVMKQLKRRRYTGWGRLSRKLINGIRDKQSGKTILDFLKSDGFANRNFMQLIHDDSLTFKEDIQKAQVSGQGDSLHEHIANLAGSPAIKKGILQTVKVVDELVKVMGRHKPENIVIEMARENQTTQKGQKNSRERMKRIEEGIKELGSQILKEHPVENTQLQNEKLYLYYLQNGRDMYVDQELDINRLSDYDVDHIVPQSFLKDDSIDNKVLTRSDKNRGKSDNVPSEEVVKKMKNYWRQLLNAKLITQRKFDNLTKAERGGLSELDKAGFIKRQLVETRQITKHVAQILDSRMNTKYDENDKLIREVKVITLKSKLVSDFRKDFQFYKVREINNYHHAHDAYLNAVVGTALIKKYPKLESEFVYGDYKVYDVRKMIAKSEQEIGKATAKYFFYSNIMNFFKTEITLANGEIRKRPLIETNGETGEIVWDKGRDFATVRKVLSMPQVNIVKKTEVQTGGFSKESILPKRNSDKLIARKKDWDPKKYGGFDSPTVAYSVLVVAKVEKGKSKKLKSVKELLGITIMERSSFEKNPIDFLEAKGYKEVKKDLIIKLPKYSLFELENGRKRMLASAGELQKGNELALPSKYVNFLYLASHYEKLKGSPEDNEQKQLFVEQHKHYLDEIIEQISEFSKRVILADANLDKVLSAYNKHRDKPIREQAENIIHLFTLTNLGAPAAFKYFDTTIDRKRYTSTKEVLDATLIHQSITGLYETRIDLSQLGGDSGGSGGSGGSTNLSDIIEKETGKQLVIQESILMLPEEVEEVIGNKPESDILVHTAYDESTDENVMLLTSDAPEYKPWALVIQDSNGENKIKMLSGGSGGSGGSTNLSDIIEKETGKQLVIQESILMLPEEVEEVIGNKPESDILVHTAYDESTDENVMLLTSDAPEYKPWALVIQDSNGENKIKMLSGGSKRTADGSEFEPKKKRKV

SEQ ID NO: 3668 - protein, 1822 aa, synthetic construct
MKRTADGSEFESPKKKRKVDSLLMNRRKFLYQFKNVRWAKGRRETYLCYVVKRRDSATSFSLDFGYLRNKNGCHVELLFLRYISDWDLDPGRCYRVTWFTSWSPCYDCARHVADFLRGNPNLSLRIFTARLYFCEDRKAEPEGLRRLHRAGVQIAIMTFKDYFYCWNTFVENHERTFKAWEGLHENSVRLSRQLRRILLPLYEVDDLRDAFRTLGLSGGSSGGSSGSETPGTSESATPESSGGSSGGSDKKYSIGLAIGTNSVGWAVITDEYKVPSKKFKVLGNTDRHSIKKNLIGALLFDSGETAEATRLKRTARRRYTRRKNRICYLQEIFSNEMAKVDDSFFHRLEESFLVEEDKKHERHPIFGNIVDEVAYHEKYPTIYHLRKKLVDSTDKADLRLIYLALAHMIKFRGHFLIEGDLNPDNSDVDKLFIQLVQTYNQLFEENPINASGVDAKAILSARLSKSRRLENLIAQLPGEKKNGLFGNLIALSLGLTPNFKSNFDLAEDAKLQLSKDTYDDDLDNLLAQIGDQYADLFLAAKNLSDAILLSDILRVNTEITKAPLSASMIKRYDEHHQDLTLLKALVRQQLPEKYKEIFFDQSKNGYAGYIDGGASQEEFYKFIKPILEKMDGTEELLVKLNREDLLRKQRTFDNGSIPHQIHLGELHAILRRQEDFYPFLKDNREKIEKILTFRIPYYVGPLARGNSRFAWMTRKSEETITPWNFEEVVDKGASAQSFIERMTNFDKNLPNEKVLPKHSLLYEYFTVYNELTKVKYVTEGMRKPAFLSGEQKKAIVDLLFKTNRKVTVKQLKEDYFKKIECFDSVEISGVEDRFNASLGTYHDLLKIIKDKDFLDNEENEDILEDIVLTLTLFEDREMIEERLKTYAHLFDDKVMKQLKRRRYTGWGRLSRKLINGIRDKQSGKTILDFLKSDGFANRNFMQLIHDDSLTFKEDIQKAQVSGQGDSLHEHIANLAGSPAIKKGILQTVKVVDELVKVMGRHKPENIVIEMARENQTTQKGQKNSRERMKRIEEGIKELGSQILKEHPVENTQLQNEKLYLYYLQNGRDMYVDQELDINRLSDYDVDHIVPQSFLKDDSIDNKVLTRSDKNRGKSDNVPSEEVVKKMKNYWRQLLNAKLITQRKFDNLTKAERGGLSELDKAGFIKRQLVETRQITKHVAQILDSRMNTKYDENDKLIREVKVITLKSKLVSDFRKDFQFYKVREINNYHHAHDAYLNAVVGTALIKKYPKLESEFVYGDYKVYDVRKMIAKSEQEIGKATAKYFFYSNIMNFFKTEITLANGEIRKRPLIETNGETGEIVWDKGRDFATVRKVLSMPQVNIVKKTEVQTGGFSKESILPKRNSDKLIARKKDWDPKKYGGFDSPTVAYSVLVVAKVEKGKSKKLKSVKELLGITIMERSSFEKNPIDFLEAKGYKEVKKDLIIKLPKYSLFELENGRKRMLASAGELQKGNELALPSKYVNFLYLASHYEKLKGSPEDNEQKQLFVEQHKHYLDEIIEQISEFSKRVILADANLDKVLSAYNKHRDKPIREQAENIIHLFTLTNLGAPAAFKYFDTTIDRKRYTSTKEVLDATLIHQSITGLYETRIDLSQLGGDSGGSGGSGGSTNLSDIIEKETGKQLVIQESILMLPEEVEEVIGNKPESDILVHTAYDESTDENVMLLTSDAPEYKPWALVIQDSNGENKIKMLSGGSGGSGGSTNLSDIIEKETGKQLVIQESILMLPEEVEEVIGNKPESDILVHTAYDESTDENVMLLTSDAPEYKPWALVIQDSNGENKIKMLSGGSKRTADGSEFEPKKKRKV

SEQ ID NO: 3669 - protein, 1832 aa, synthetic construct
MKRTADGSEFESPKKKRKVTDAEYVRIHEKLDIYTFKKQFFNNKKSVSHRCYVLFELKRRGERRACFWGYAVNKPQSGTERGIHAEIFSIRKVEEYLRDNPGQFTINWYSSWSPCADCAEKILEWYNQELRGNGHTLKIWACKLYYEKNARNQIGLWNLRDNGVGLNVMVSEHYQCCRKIFIQSSHNQLNENRWLEKTLKRAEKRRSELSIMIQVKILHTTKSPAVSGGSSGGSSGSETPGTSESATPESSGGSSGGSDKKYSIGLAIGTNSVGWAVITDEYKVPSKKFKVLGNTDRHSIKKNLIGALLFDSGETAEATRLKRTARRRYTRRKNRICYLQEIFSNEMAKVDDSFFHRLEESFLVEEDKKHERHPIFGNIVDEVAYHEKYPTIYHLRKKLVDSTDKADLRLIYLALAHMIKFRGHFLIEGDLNPDNSDVDKLFIQLVQTYNQLFEENPINASGVDAKAILSARLSKSRRLENLIAQLPGEKKNGLFGNLIALSLGLTPNFKSNFDLAEDAKLQLSKDTYDDDLDNLLAQIGDQYADLFLAAKNLSDAILLSDILRVNTEITKAPLSASMIKRYDEHHQDLTLLKALVRQQLPEKYKEIFFDQSKNGYAGYIDGGASQEEFYKFIKPILEKMDGTEELLVKLNREDLLRKQRTFDNGSIPHQIHLGELHAILRRQEDFYPFLKDNREKIEKILTFRIPYYVGPLARGNSRFAWMTRKSEETITPWNFEEVVDKGASAQSFIERMTNFDKNLPNEKVLPKHSLLYEYFTVYNELTKVKYVTEGMRKPAFLSGEQKKAIVDLLFKTNRKVTVKQLKEDYFKKIECFDSVEISGVEDRFNASLGTYHDLLKIIKDKDFLDNEENEDILEDIVLTLTLFEDREMIEERLKTYAHLFDDKVMKQLKRRRYTGWGRLSRKLINGIRDKQSGKTILDFLKSDGFANRNFMQLIHDDSLTFKEDIQKAQVSGQGDSLHEHIANLAGSPAIKKGILQTVKVVDELVKVMGRHKPENIVIEMARENQTTQKGQKNSRERMKRIEEGIKELGSQILKEHPVENTQLQNEKLYLYYLQNGRDMYVDQELDINRLSDYDVDHIVPQSFLKDDSIDNKVLTRSDKNRGKSDNVPSEEVVKKMKNYWRQLLNAKLITQRKFDNLTKAERGGLSELDKAGFIKRQLVETRQITKHVAQILDSRMNTKYDENDKLIREVKVITLKSKLVSDFRKDFQFYKVREINNYHHAHDAYLNAVVGTALIKKYPKLESEFVYGDYKVYDVRKMIAKSEQEIGKATAKYFFYSNIMNFFKTEITLANGEIRKRPLIETNGETGEIVWDKGRDFATVRKVLSMPQVNIVKKTEVQTGGFSKESILPKRNSDKLIARKKDWDPKKYGGFDSPTVAYSVLVVAKVEKGKSKKLKSVKELLGITIMERSSFEKNPIDFLEAKGYKEVKKDLIIKLPKYSLFELENGRKRMLASAGELQKGNELALPSKYVNFLYLASHYEKLKGSPEDNEQKQLFVEQHKHYLDEIIEQISEFSKRVILADANLDKVLSAYNKHRDKPIREQAENIIHLFTLTNLGAPAAFKYFDTTIDRKRYTSTKEVLDATLIHQSITGLYETRIDLSQLGGDSGGSGGSGGSTNLSDIIEKETGKQLVIQESILMLPEEVEEVIGNKPESDILVHTAYDESTDENVMLLTSDAPEYKPWALVIQDSNGENKIKMLSGGSGGSGGSTNLSDIIEKETGKQLVIQESILMLPEEVEEVIGNKPESDILVHTAYDESTDENVMLLTSDAPEYKPWALVIQDSNGENKIKMLSGGSKRTADGSEFEPKKKRKV

SEQ ID NO: 3670 - protein, 1786 aa, synthetic construct
MKRTADGSEFESPKKKRKVFERNYDPRELRKETYLLYEIKWGKSGKLWRHWCQNNRTQHAEVYFLENIFNARRFNPSTHCSITWYLSWSPCAECSQKIVDFLKEHPNVNLEIYVARLYYHEDERNRQGLRDLVNSGVTIRIMDLPDYNYCWKTFVSDQGGDEDYWPGHFAPWIKQYSLKLSGGSSGGSSGSETPGTSESATPESSGGSSGGSDKKYSIGLAIGTNSVGWAVITDEYKVPSKKFKVLGNTDRHSIKKNLIGALLFDSGETAEATRLKRTARRRYTRRKNRICYLQEIFSNEMAKVDDSFFHRLEESFLVEEDKKHERHPIFGNIVDEVAYHEKYPTIYHLRKKLVDSTDKADLRLIYLALAHMIKFRGHFLIEGDLNPDNSDVDKLFIQLVQTYNQLFEENPINASGVDAKAILSARLSKSRRLENLIAQLPGEKKNGLFGNLIALSLGLTPNFKSNFDLAEDAKLQLSKDTYDDDLDNLLAQIGDQYADLFLAAKNLSDAILLSDILRVNTEITKAPLSASMIKRYDEHHQDLTLLKALVRQQLPEKYKEIFFDQSKNGYAGYIDGGASQEEFYKFIKPILEKMDGTEELLVKLNREDLLRKQRTFDNGSIPHQIHLGELHAILRRQEDFYPFLKDNREKIEKILTFRIPYYVGPLARGNSRFAWMTRKSEETITPWNFEEVVDKGASAQSFIERMTNFDKNLPNEKVLPKHSLLYEYFTVYNELTKVKYVTEGMRKPAFLSGEQKKAIVDLLFKTNRKVTVKQLKEDYFKKIECFDSVEISGVEDRFNASLGTYHDLLKIIKDKDFLDNEENEDILEDIVLTLTLFEDREMIEERLKTYAHLFDDKVMKQLKRRRYTGWGRLSRKLINGIRDKQSGKTILDFLKSDGFANRNFMQLIHDDSLTFKEDIQKAQVSGQGDSLHEHIANLAGSPAIKKGILQTVKVVDELVKVMGRHKPENIVIEMARENQTTQKGQKNSRERMKRIEEGIKELGSQILKEHPVENTQLQNEKLYLYYLQNGRDMYVDQELDINRLSDYDVDHIVPQSFLKDDSIDNKVLTRSDKNRGKSDNVPSEEVVKKMKNYWRQLLNAKLITQRKFDNLTKAERGGLSELDKAGFIKRQLVETRQITKHVAQILDSRMNTKYDENDKLIREVKVITLKSKLVSDFRKDFQFYKVREINNYHHAHDAYLNAVVGTALIKKYPKLESEFVYGDYKVYDVRKMIAKSEQEIGKATAKYFFYSNIMNFFKTEITLANGEIRKRPLIETNGETGEIVWDKGRDFATVRKVLSMPQVNIVKKTEVQTGGFSKESILPKRNSDKLIARKKDWDPKKYGGFDSPTVAYSVLVVAKVEKGKSKKLKSVKELLGITIMERSSFEKNPIDFLEAKGYKEVKKDLIIKLPKYSLFELENGRKRMLASAGELQKGNELALPSKYVNFLYLASHYEKLKGSPEDNEQKQLFVEQHKHYLDEIIEQISEFSKRVILADANLDKVLSAYNKHRDKPIREQAENIIHLFTLTNLGAPAAFKYFDTTIDRKRYTSTKEVLDATLIHQSITGLYETRIDLSQLGGDSGGSGGSGGSTNLSDIIEKETGKQLVIQESILMLPEEVEEVIGNKPESDILVHTAYDESTDENVMLLTSDAPEYKPWALVIQDSNGENKIKMLSGGSGGSGGSTNLSDIIEKETGKQLVIQESILMLPEEVEEVIGNKPESDILVHTAYDESTDENVMLLTSDAPEYKPWALVIQDSNGENKIKMLSGGSKRTADGSEFEPKKKRKV

SEQ ID NO: 3671 - protein, 1823 aa, synthetic construct
MKRTADGSEFESPKKKRKVEASPASGPRHLMDPHIFTSNFNNGIGRHKTYLCYEVERLDNGTSVKMDQHRGFLHGQAKNLLCGFYGRHAELRFLDLVPSLQLDPAQIYRVTWFISWSPCFSWGCAGEVRAFLQENTHVRLRIFAARIYDYDPLYKEALQMLRDAGAQVSIMTYDEFKHCWDTFVDHQGCPFQPWDGLDEHSQALSGRLRAILQNQGNSGGSSGGSSGSETPGTSESATPESSGGSSGGSDKKYSIGLAIGTNSVGWAVITDEYKVPSKKFKVLGNTDRHSIKKNLIGALLFDSGETAEATRLKRTARRRYTRRKNRICYLQEIFSNEMAKVDDSFFHRLEESFLVEEDKKHERHPIFGNIVDEVAYHEKYPTIYHLRKKLVDSTDKADLRLIYLALAHMIKFRGHFLIEGDLNPDNSDVDKLFIQLVQTYNQLFEENPINASGVDAKAILSARLSKSRRLENLIAQLPGEKKNGLFGNLIALSLGLTPNFKSNFDLAEDAKLQLSKDTYDDDLDNLLAQIGDQYADLFLAAKNLSDAILLSDILRVNTEITKAPLSASMIKRYDEHHQDLTLLKALVRQQLPEKYKEIFFDQSKNGYAGYIDGGASQEEFYKFIKPILEKMDGTEELLVKLNREDLLRKQRTFDNGSIPHQIHLGELHAILRRQEDFYPFLKDNREKIEKILTFRIPYYVGPLARGNSRFAWMTRKSEETITPWNFEEVVDKGASAQSFIERMTNFDKNLPNEKVLPKHSLLYEYFTVYNELTKVKYVTEGMRKPAFLSGEQKKAIVDLLFKTNRKVTVKQLKEDYFKKIECFDSVEISGVEDRFNASLGTYHDLLKIIKDKDFLDNEENEDILEDIVLTLTLFEDREMIEERLKTYAHLFDDKVMKQLKRRRYTGWGRLSRKLINGIRDKQSGKTILDFLKSDGFANRNFMQLIHDDSLTFKEDIQKAQVSGQGDSLHEHIANLAGSPAIKKGILQTVKVVDELVKVMGRHKPENIVIEMARENQTTQKGQKNSRERMKRIEEGIKELGSQILKEHPVENTQLQNEKLYLYYLQNGRDMYVDQELDINRLSDYDVDHIVPQSFLKDDSIDNKVLTRSDKNRGKSDNVPSEEVVKKMKNYWRQLLNAKLITQRKFDNLTKAERGGLSELDKAGFIKRQLVETRQITKHVAQILDSRMNTKYDENDKLIREVKVITLKSKLVSDFRKDFQFYKVREINNYHHAHDAYLNAVVGTALIKKYPKLESEFVYGDYKVYDVRKMIAKSEQEIGKATAKYFFYSNIMNFFKTEITLANGEIRKRPLIETNGETGEIVWDKGRDFATVRKVLSMPQVNIVKKTEVQTGGFSKESILPKRNSDKLIARKKDWDPKKYGGFDSPTVAYSVLVVAKVEKGKSKKLKSVKELLGITIMERSSFEKNPIDFLEAKGYKEVKKDLIIKLPKYSLFELENGRKRMLASAGELQKGNELALPSKYVNFLYLASHYEKLKGSPEDNEQKQLFVEQHKHYLDEIIEQISEFSKRVILADANLDKVLSAYNKHRDKPIREQAENIIHLFTLTNLGAPAAFKYFDTTIDRKRYTSTKEVLDATLIHQSITGLYETRIDLSQLGGDSGGSGGSGGSTNLSDIIEKETGKQLVIQESILMLPEEVEEVIGNKPESDILVHTAYDESTDENVMLLTSDAPEYKPWALVIQDSNGENKIKMLSGGSGGSGGSTNLSDIIEKETGKQLVIQESILMLPEEVEEVIGNKPESDILVHTAYDESTDENVMLLTSDAPEYKPWALVIQDSNGENKIKMLSGGSKRTADGSEFEPKKKRKV

SEQ ID NO: 3672 - protein, 1853 aa, synthetic construct
MKRTADGSEFESPKKKRKVSSETGPVAVDPTLRRRIEPHEFEVFFDPRELAAETCLLYEINWGGRHSIWRHTSQNTNKHVEVNFIEKFTTERYFCPNTRCSITWFLSWSPCGECSRAITEFLSRYPHVTLFIYIARLYHLANPRNRQGLRDLISSGVTIQIMTEQESGYCWRNFVNYSPSNEAHWPRYPHLWVRLYVLELYCIILGLPPCLNILRRKQPQLTFFTIALQSCHYQRLPPHILWATGLKSGGSSGGSSGSETPGTSESATPESSGGSSGGSDKKYSIGLAIGTNSVGWAVITDEYKVPSKKFKVLGNTDRHSIKKNLIGALLFDSGETAEATRLKRTARRRYTRRKNRICYLQEIFSNEMAKVDDSFFHRLEESFLVEEDKKHERHPIFGNIVDEVAYHEKYPTIYHLRKKLVDSTDKADLRLIYLALAHMIKFRGHFLIEGDLNPDNSDVDKLFIQLVQTYNQLFEENPINASGVDAKAILSARLSKSRRLENLIAQLPGEKKNGLFGNLIALSLGLTPNFKSNFDLAEDAKLQLSKDTYDDDLDNLLAQIGDQYADLFLAAKNLSDAILLSDILRVNTEITKAPLSASMIKRYDEHHQDLTLLKALVRQQLPEKYKEIFFDQSKNGYAGYIDGGASQEEFYKFIKPILEKMDGTEELLVKLNREDLLRKQRTFDNGSIPHQIHLGELHAILRRQEDFYPFLKDNREKIEKILTFRIPYYVGPLARGNSRFAWMTRKSEETITPWNFEEVVDKGASAQSFIERMTNFDKNLPNEKVLPKHSLLYEYFTVYNELTKVKYVTEGMRKPAFLSGEQKKAIVDLLFKTNRKVTVKQLKEDYFKKIECFDSVEISGVEDRFNASLGTYHDLLKIIKDKDFLDNEENEDILEDIVLTLTLFEDREMIEERLKTYAHLFDDKVMKQLKRRRYTGWGRLSRKLINGIRDKQSGKTILDFLKSDGFANRNFMQLIHDDSLTFKEDIQKAQVSGQGDSLHEHIANLAGSPAIKKGILQTVKVVDELVKVMGRHKPENIVIEMARENQTTQKGQKNSRERMKRIEEGIKELGSQILKEHPVENTQLQNEKLYLYYLQNGRDMYVDQELDINRLSDYDVDHIVPQSFLKDDSIDNKVLTRSDKNRGKSDNVPSEEVVKKMKNYWRQLLNAKLITQRKFDNLTKAERGGLSELDKAGFIKRQLVETRQITKHVAQILDSRMNTKYDENDKLIREVKVITLKSKLVSDFRKDFQFYKVREINNYHHAHDAYLNAVVGTALIKKYPKLESEFVYGDYKVYDVRKMIAKSEQEIGKATAKYFFYSNIMNFFKTEITLANGEIRKRPLIETNGETGEIVWDKGRDFATVRKVLSMPQVNIVKKTEVQTGGFSKESILPKRNSDKLIARKKDWDPKKYGGFDSPTVAYSVLVVAKVEKGKSKKLKSVKELLGITIMERSSFEKNPIDFLEAKGYKEVKKDLIIKLPKYSLFELENGRKRMLASAGELQKGNELALPSKYVNFLYLASHYEKLKGSPEDNEQKQLFVEQHKHYLDEIIEQISEFSKRVILADANLDKVLSAYNKHRDKPIREQAENIIHLFTLTNLGAPAAFKYFDTTIDRKRYTSTKEVLDATLIHQSITGLYETRIDLSQLGGDSGGSGGSGGSTNLSDIIEKETGKQLVIQESILMLPEEVEEVIGNKPESDILVHTAYDESTDENVMLLTSDAPEYKPWALVIQDSNGENKIKMLSGGSGGSGGSTNLSDIIEKETGKQLVIQESILMLPEEVEEVIGNKPESDILVHTAYDESTDENVMLLTSDAPEYKPWALVIQDSNGENKIKMLSGGSKRTADGSEFEPKKKRKV

SEQ ID NO: 3673 - protein, 1853 aa, synthetic construct
MKRTADGSEFESPKKKRKVSSETGPVAVDPTLRRRIEPHEFEVFFDPRELRKETCLLYEINWGGRHSIWRHTSQNTNKHVEVNFIEKFTTERYFCPNTRCSITWFLSWSPCGECSRAITEFLSRYPHVTLFIYIARLYHHADPRNRQGLRDLISSGVTIQIMTEQESGYCWRNFVNYSPSNEAHWPRYPHLWVRLYVLELYCIILGLPPCLNILRRKQPQLTFFTIALQSCHYQRLPPHILWATGLKSGGSSGGSSGSETPGTSESATPESSGGSSGGSDKKYSIGLAIGTNSVGWAVITDEYKVPSKKFKVLGNTDRHSIKKNLIGALLFDSGETAEATRLKRTARRRYTRRKNRICYLQEIFSNEMAKVDDSFFHRLEESFLVEEDKKHERHPIFGNIVDEVAYHEKYPTIYHLRKKLVDSTDKADLRLIYLALAHMIKFRGHFLIEGDLNPDNSDVDKLFIQLVQTYNQLFEENPINASGVDAKAILSARLSKSRRLENLIAQLPGEKKNGLFGNLIALSLGLTPNFKSNFDLAEDAKLQLSKDTYDDDLDNLLAQIGDQYADLFLAAKNLSDAILLSDILRVNTEITKAPLSASMIKRYDEHHQDLTLLKALVRQQLPEKYKEIFFDQSKNGYAGYIDGGASQEEFYKFIKPILEKMDGTEELLVKLNREDLLRKQRTFDNGSIPHQIHLGELHAILRRQEDFYPFLKDNREKIEKILTFRIPYYVGPLARGNSRFAWMTRKSEETITPWNFEEVVDKGASAQSFIERMTNFDKNLPNEKVLPKHSLLYEYFTVYNELTKVKYVTEGMRKPAFLSGEQKKAIVDLLFKTNRKVTVKQLKEDYFKKIECFDSVEISGVEDRFNASLGTYHDLLKIIKDKDFLDNEENEDILEDIVLTLTLFEDREMIEERLKTYAHLFDDKVMKQLKRRRYTGWGRLSRKLINGIRDKQSGKTILDFLKSDGFANRNFMQLIHDDSLTFKEDIQKAQVSGQGDSLHEHIANLAGSPAIKKGILQTVKVVDELVKVMGRHKPENIVIEMARENQTTQKGQKNSRERMKRIEEGIKELGSQILKEHPVENTQLQNEKLYLYYLQNGRDMYVDQELDINRLSDYDVDHIVPQSFLKDDSIDNKVLTRSDKNRGKSDNVPSEEVVKKMKNYWRQLLNAKLITQRKFDNLTKAERGGLSELDKAGFIKRQLVETRQITKHVAQILDSRMNTKYDENDKLIREVKVITLKSKLVSDFRKDFQFYKVREINNYHHAHDAYLNAVVGTALIKKYPKLESEFVYGDYKVYDVRKMIAKSEQEIGKATAKYFFYSNIMNFFKTEITLANGEIRKRPLIETNGETGEIVWDKGRDFATVRKVLSMPQVNIVKKTEVQTGGFSKESIRPKRNSDKLIARKKDWDPKKYGGFVSPTVAYSVLVVAKVEKGKSKKLKSVKELLGITIMERSSFEKNPIDFLEAKGYKEVKKDLIIKLPKYSLFELENGRKRMLASARFLQKGNELALPSKYVNFLYLASHYEKLKGSPEDNEQKQLFVEQHKHYLDEIIEQISEFSKRVILADANLDKVLSAYNKHRDKPIREQAENIIHLFTLTNLGAPRAFKYFDTTIDRKVYRSTKEVLDATLIHQSITGLYETRIDLSQLGGDSGGSGGSGGSTNLSDIIEKETGKQLVIQESILMLPEEVEEVIGNKPESDILVHTAYDESTDENVMLLTSDAPEYKPWALVIQDSNGENKIKMLSGGSGGSGGSTNLSDIIEKETGKQLVIQESILMLPEEVEEVIGNKPESDILVHTAYDESTDENVMLLTSDAPEYKPWALVIQDSNGENKIKMLSGGSKRTADGSEFEPKKKRKV

SEQ ID NO: 3674 - protein, 1853 aa, synthetic construct
MKRTADGSEFESPKKKRKVSSETGPVAVDPTLRRRIEPHEFEVFFDPRELRKETCLLYEINWGGRHSIWRHTSQNTNKHVEVNFIEKFTTERYFCPNTRCSITWFLSYSPCGECSRAITEFLSRYPHVTLFIYIARLYHHADPENRQGLRDLISSGVTIQIMTEQESGYCWRNFVNYSPSNEAHWPRYPHLWVRLYVLELYCIILGLPPCLNILRRKQPQLTFFTIALQSCHYQRLPPHILWATGLKSGGSSGGSSGSETPGTSESATPESSGGSSGGSDKKYSIGLAIGTNSVGWAVITDEYKVPSKKFKVLGNTDRHSIKKNLIGALLFDSGETAEATRLKRTARRRYTRRKNRICYLQEIFSNEMAKVDDSFFHRLEESFLVEEDKKHERHPIFGNIVDEVAYHEKYPTIYHLRKKLVDSTDKADLRLIYLALAHMIKFRGHFLIEGDLNPDNSDVDKLFIQLVQTYNQLFEENPINASGVDAKAILSARLSKSRRLENLIAQLPGEKKNGLFGNLIALSLGLTPNFKSNFDLAEDAKLQLSKDTYDDDLDNLLAQIGDQYADLFLAAKNLSDAILLSDILRVNTEITKAPLSASMIKRYDEHHQDLTLLKALVRQQLPEKYKEIFFDQSKNGYAGYIDGGASQEEFYKFIKPILEKMDGTEELLVKLNREDLLRKQRTFDNGSIPHQIHLGELHAILRRQEDFYPFLKDNREKIEKILTFRIPYYVGPLARGNSRFAWMTRKSEETITPWNFEEVVDKGASAQSFIERMTNFDKNLPNEKVLPKHSLLYEYFTVYNELTKVKYVTEGMRKPAFLSGEQKKAIVDLLFKTNRKVTVKQLKEDYFKKIECFDSVEISGVEDRFNASLGTYHDLLKIIKDKDFLDNEENEDILEDIVLTLTLFEDREMIEERLKTYAHLFDDKVMKQLKRRRYTGWGRLSRKLINGIRDKQSGKTILDFLKSDGFANRNFMQLIHDDSLTFKEDIQKAQVSGQGDSLHEHIANLAGSPAIKKGILQTVKVVDELVKVMGRHKPENIVIEMARENQTTQKGQKNSRERMKRIEEGIKELGSQILKEHPVENTQLQNEKLYLYYLQNGRDMYVDQELDINRLSDYDVDHIVPQSFLKDDSIDNKVLTRSDKNRGKSDNVPSEEVVKKMKNYWRQLLNAKLITQRKFDNLTKAERGGLSELDKAGFIKRQLVETRQITKHVAQILDSRMNTKYDENDKLIREVKVITLKSKLVSDFRKDFQFYKVREINNYHHAHDAYLNAVVGTALIKKYPKLESEFVYGDYKVYDVRKMIAKSEQEIGKATAKYFFYSNIMNFFKTEITLANGEIRKRPLIETNGETGEIVWDKGRDFATVRKVLSMPQVNIVKKTEVQTGGFSKESIRPKRNSDKLIARKKDWDPKKYGGFVSPTVAYSVLVVAKVEKGKSKKLKSVKELLGITIMERSSFEKNPIDFLEAKGYKEVKKDLIIKLPKYSLFELENGRKRMLASARFLQKGNELALPSKYVNFLYLASHYEKLKGSPEDNEQKQLFVEQHKHYLDEIIEQISEFSKRVILADANLDKVLSAYNKHRDKPIREQAENIIHLFTLTNLGAPRAFKYFDTTIDRKVYRSTKEVLDATLIHQSITGLYETRIDLSQLGGDSGGSGGSGGSTNLSDIIEKETGKQLVIQESILMLPEEVEEVIGNKPESDILVHTAYDESTDENVMLLTSDAPEYKPWALVIQDSNGENKIKMLSGGSGGSGGSTNLSDIIEKETGKQLVIQESILMLPEEVEEVIGNKPESDILVHTAYDESTDENVMLLTSDAPEYKPWALVIQDSNGENKIKMLSGGSKRTADGSEFEPKKKRKV

SEQ ID NO: 3675 - protein, 1853 aa, synthetic construct
MKRTADGSEFESPKKKRKVSSETGPVAVDPTLRRRIEPHEFEVFFDPRELRKETCLLYEINWGGRHSIWRHTSQNTNKHVEVNFIEKFTTERYFCPNTRCSITWFLSYSPCGECSRAITEFLSRYPHVTLFIYIARLYHHADPRNRQGLEDLISSGVTIQIMTEQESGYCWRNFVNYSPSNEAHWPRYPHLWVRLYVLELYCIILGLPPCLNILRRKQPQLTFFTIALQSCHYQRLPPHILWATGLKSGGSSGGSSGSETPGTSESATPESSGGSSGGSDKKYSIGLAIGTNSVGWAVITDEYKVPSKKFKVLGNTDRHSIKKNLIGALLFDSGETAEATRLKRTARRRYTRRKNRICYLQEIFSNEMAKVDDSFFHRLEESFLVEEDKKHERHPIFGNIVDEVAYHEKYPTIYHLRKKLVDSTDKADLRLIYLALAHMIKFRGHFLIEGDLNPDNSDVDKLFIQLVQTYNQLFEENPINASGVDAKAILSARLSKSRRLENLIAQLPGEKKNGLFGNLIALSLGLTPNFKSNFDLAEDAKLQLSKDTYDDDLDNLLAQIGDQYADLFLAAKNLSDAILLSDILRVNTEITKAPLSASMIKRYDEHHQDLTLLKALVRQQLPEKYKEIFFDQSKNGYAGYIDGGASQEEFYKFIKPILEKMDGTEELLVKLNREDLLRKQRTFDNGSIPHQIHLGELHAILRRQEDFYPFLKDNREKIEKILTFRIPYYVGPLARGNSRFAWMTRKSEETITPWNFEEVVDKGASAQSFIERMTNFDKNLPNEKVLPKHSLLYEYFTVYNELTKVKYVTEGMRKPAFLSGEQKKAIVDLLFKTNRKVTVKQLKEDYFKKIECFDSVEISGVEDRFNASLGTYHDLLKIIKDKDFLDNEENEDILEDIVLTLTLFEDREMIEERLKTYAHLFDDKVMKQLKRRRYTGWGRLSRKLINGIRDKQSGKTILDFLKSDGFANRNFMQLIHDDSLTFKEDIQKAQVSGQGDSLHEHIANLAGSPAIKKGILQTVKVVDELVKVMGRHKPENIVIEMARENQTTQKGQKNSRERMKRIEEGIKELGSQILKEHPVENTQLQNEKLYLYYLQNGRDMYVDQELDINRLSDYDVDHIVPQSFLKDDSIDNKVLTRSDKNRGKSDNVPSEEVVKKMKNYWRQLLNAKLITQRKFDNLTKAERGGLSELDKAGFIKRQLVETRQITKHVAQILDSRMNTKYDENDKLIREVKVITLKSKLVSDFRKDFQFYKVREINNYHHAHDAYLNAVVGTALIKKYPKLESEFVYGDYKVYDVRKMIAKSEQEIGKATAKYFFYSNIMNFFKTEITLANGEIRKRPLIETNGETGEIVWDKGRDFATVRKVLSMPQVNIVKKTEVQTGGFSKESIRPKRNSDKLIARKKDWDPKKYGGFVSPTVAYSVLVVAKVEKGKSKKLKSVKELLGITIMERSSFEKNPIDFLEAKGYKEVKKDLIIKLPKYSLFELENGRKRMLASARFLQKGNELALPSKYVNFLYLASHYEKLKGSPEDNEQKQLFVEQHKHYLDEIIEQISEFSKRVILADANLDKVLSAYNKHRDKPIREQAENIIHLFTLTNLGAPRAFKYFDTTIDRKVYRSTKEVLDATLIHQSITGLYETRIDLSQLGGDSGGSGGSGGSTNLSDIIEKETGKQLVIQESILMLPEEVEEVIGNKPESDILVHTAYDESTDENVMLLTSDAPEYKPWALVIQDSNGENKIKMLSGGSGGSGGSTNLSDIIEKETGKQLVIQESILMLPEEVEEVIGNKPESDILVHTAYDESTDENVMLLTSDAPEYKPWALVIQDSNGENKIKMLSGGSKRTADGSEFEPKKKRKV

SEQ ID NO: 3676 - protein, 1853 aa, synthetic construct
MKRTADGSEFESPKKKRKVSSETGPVAVDPTLRRRIEPHEFEVFFDPRELRKETCLLYEINWGGRHSIWRHTSQNTNKHVEVNFIEKFTTERYFCPNTRCSITWFLSYSPCGECSRAITEFLSRYPHVTLFIYIARLYHHADPENRQGLEDLISSGVTIQIMTEQESGYCWRNFVNYSPSNEAHWPRYPHLWVRLYVLELYCIILGLPPCLNILRRKQPQLTFFTIALQSCHYQRLPPHILWATGLKSGGSSGGSSGSETPGTSESATPESSGGSSGGSDKKYSIGLAIGTNSVGWAVITDEYKVPSKKFKVLGNTDRHSIKKNLIGALLFDSGETAEATRLKRTARRRYTRRKNRICYLQEIFSNEMAKVDDSFFHRLEESFLVEEDKKHERHPIFGNIVDEVAYHEKYPTIYHLRKKLVDSTDKADLRLIYLALAHMIKFRGHFLIEGDLNPDNSDVDKLFIQLVQTYNQLFEENPINASGVDAKAILSARLSKSRRLENLIAQLPGEKKNGLFGNLIALSLGLTPNFKSNFDLAEDAKLQLSKDTYDDDLDNLLAQIGDQYADLFLAAKNLSDAILLSDILRVNTEITKAPLSASMIKRYDEHHQDLTLLKALVRQQLPEKYKEIFFDQSKNGYAGYIDGGASQEEFYKFIKPILEKMDGTEELLVKLNREDLLRKQRTFDNGSIPHQIHLGELHAILRRQEDFYPFLKDNREKIEKILTFRIPYYVGPLARGNSRFAWMTRKSEETITPWNFEEVVDKGASAQSFIERMTNFDKNLPNEKVLPKHSLLYEYFTVYNELTKVKYVTEGMRKPAFLSGEQKKAIVDLLFKTNRKVTVKQLKEDYFKKIECFDSVEISGVEDRFNASLGTYHDLLKIIKDKDFLDNEENEDILEDIVLTLTLFEDREMIEERLKTYAHLFDDKVMKQLKRRRYTGWGRLSRKLINGIRDKQSGKTILDFLKSDGFANRNFMQLIHDDSLTFKEDIQKAQVSGQGDSLHEHIANLAGSPAIKKGILQTVKVVDELVKVMGRHKPENIVIEMARENQTTQKGQKNSRERMKRIEEGIKELGSQILKEHPVENTQLQNEKLYLYYLQNGRDMYVDQELDINRLSDYDVDHIVPQSFLKDDSIDNKVLTRSDKNRGKSDNVPSEEVVKKMKNYWRQLLNAKLITQRKFDNLTKAERGGLSELDKAGFIKRQLVETRQITKHVAQILDSRMNTKYDENDKLIREVKVITLKSKLVSDFRKDFQFYKVREINNYHHAHDAYLNAVVGTALIKKYPKLESEFVYGDYKVYDVRKMIAKSEQEIGKATAKYFFYSNIMNFFKTEITLANGEIRKRPLIETNGETGEIVWDKGRDFATVRKVLSMPQVNIVKKTEVQTGGFSKESIRPKRNSDKLIARKKDWDPKKYGGFVSPTVAYSVLVVAKVEKGKSKKLKSVKELLGITIMERSSFEKNPIDFLEAKGYKEVKKDLIIKLPKYSLFELENGRKRMLASARFLQKGNELALPSKYVNFLYLASHYEKLKGSPEDNEQKQLFVEQHKHYLDEIIEQISEFSKRVILADANLDKVLSAYNKHRDKPIREQAENIIHLFTLTNLGAPRAFKYFDTTIDRKVYRSTKEVLDATLIHQSITGLYETRIDLSQLGGDSGGSGGSGGSTNLSDIIEKETGKQLVIQESILMLPEEVEEVIGNKPESDILVHTAYDESTDENVMLLTSDAPEYKPWALVIQDSNGENKIKMLSGGSGGSGGSTNLSDIIEKETGKQLVIQESILMLPEEVEEVIGNKPESDILVHTAYDESTDENVMLLTSDAPEYKPWALVIQDSNGENKIKMLSGGSKRTADGSEFEPKKKRKV

SEQ ID NO: 3677 - protein, 1853 aa, synthetic construct
MKRTADGSEFESPKKKRKVSSETGPVAVDPTLRRRIEPHEFEVFFDPRELRKETCLLYEINWGGRHSIWRHTSQNTNKHVEVNFIEKFTTERYFCPNTRCSITWFLSWSPCGECSRAITEFLSRYPHVTLFIYIARLYHHADPENRQGLEDLISSGVTIQIMTEQESGYCWRNFVNYSPSNEAHWPRYPHLWVRLYVLELYCIILGLPPCLNILRRKQPQLTFFTIALQSCHYQRLPPHILWATGLKSGGSSGGSSGSETPGTSESATPESSGGSSGGSDKKYSIGLAIGTNSVGWAVITDEYKVPSKKFKVLGNTDRHSIKKNLIGALLFDSGETAEATRLKRTARRRYTRRKNRICYLQEIFSNEMAKVDDSFFHRLEESFLVEEDKKHERHPIFGNIVDEVAYHEKYPTIYHLRKKLVDSTDKADLRLIYLALAHMIKFRGHFLIEGDLNPDNSDVDKLFIQLVQTYNQLFEENPINASGVDAKAILSARLSKSRRLENLIAQLPGEKKNGLFGNLIALSLGLTPNFKSNFDLAEDAKLQLSKDTYDDDLDNLLAQIGDQYADLFLAAKNLSDAILLSDILRVNTEITKAPLSASMIKRYDEHHQDLTLLKALVRQQLPEKYKEIFFDQSKNGYAGYIDGGASQEEFYKFIKPILEKMDGTEELLVKLNREDLLRKQRTFDNGSIPHQIHLGELHAILRRQEDFYPFLKDNREKIEKILTFRIPYYVGPLARGNSRFAWMTRKSEETITPWNFEEVVDKGASAQSFIERMTNFDKNLPNEKVLPKHSLLYEYFTVYNELTKVKYVTEGMRKPAFLSGEQKKAIVDLLFKTNRKVTVKQLKEDYFKKIECFDSVEISGVEDRFNASLGTYHDLLKIIKDKDFLDNEENEDILEDIVLTLTLFEDREMIEERLKTYAHLFDDKVMKQLKRRRYTGWGRLSRKLINGIRDKQSGKTILDFLKSDGFANRNFMQLIHDDSLTFKEDIQKAQVSGQGDSLHEHIANLAGSPAIKKGILQTVKVVDELVKVMGRHKPENIVIEMARENQTTQKGQKNSRERMKRIEEGIKELGSQILKEHPVENTQLQNEKLYLYYLQNGRDMYVDQELDINRLSDYDVDHIVPQSFLKDDSIDNKVLTRSDKNRGKSDNVPSEEVVKKMKNYWRQLLNAKLITQRKFDNLTKAERGGLSELDKAGFIKRQLVETRQITKHVAQILDSRMNTKYDENDKLIREVKVITLKSKLVSDFRKDFQFYKVREINNYHHAHDAYLNAVVGTALIKKYPKLESEFVYGDYKVYDVRKMIAKSEQEIGKATAKYFFYSNIMNFFKTEITLANGEIRKRPLIETNGETGEIVWDKGRDFATVRKVLSMPQVNIVKKTEVQTGGFSKESIRPKRNSDKLIARKKDWDPKKYGGFVSPTVAYSVLVVAKVEKGKSKKLKSVKELLGITIMERSSFEKNPIDFLEAKGYKEVKKDLIIKLPKYSLFELENGRKRMLASARFLQKGNELALPSKYVNFLYLASHYEKLKGSPEDNEQKQLFVEQHKHYLDEIIEQISEFSKRVILADANLDKVLSAYNKHRDKPIREQAENIIHLFTLTNLGAPRAFKYFDTTIDRKVYRSTKEVLDATLIHQSITGLYETRIDLSQLGGDSGGSGGSGGSTNLSDIIEKETGKQLVIQESILMLPEEVEEVIGNKPESDILVHTAYDESTDENVMLLTSDAPEYKPWALVIQDSNGENKIKMLSGGSGGSGGSTNLSDIIEKETGKQLVIQESILMLPEEVEEVIGNKPESDILVHTAYDESTDENVMLLTSDAPEYKPWALVIQDSNGENKIKMLSGGSKRTADGSEFEPKKKRKV

SEQ ID NO: 3678 - protein, 1853 aa, synthetic construct
MKRTADGSEFESPKKKRKVSSETGPVAVDPTLRRRIEPHEFEVFFDPRELAAETCLLYEINWGGRHSIWRHTSQNTNKHVEVNFIEKFTTERYFCPNTRCSITWFLSWSPCGECSRAITEFLSRYPHVTLFIYIARLYHHADPRNRQGLRDLISSGVTIQIMTEQESGYCWRNFVNYSPSNEAHWPRYPHLWVRLYVLELYCIILGLPPCLNILRRKQPQLTFFTIALQSCHYQRLPPHILWATGLKSGGSSGGSSGSETPGTSESATPESSGGSSGGSDKKYSIGLAIGTNSVGWAVITDEYKVPSKKFKVLGNTDRHSIKKNLIGALLFDSGETAEATRLKRTARRRYTRRKNRICYLQEIFSNEMAKVDDSFFHRLEESFLVEEDKKHERHPIFGNIVDEVAYHEKYPTIYHLRKKLVDSTDKADLRLIYLALAHMIKFRGHFLIEGDLNPDNSDVDKLFIQLVQTYNQLFEENPINASGVDAKAILSARLSKSRRLENLIAQLPGEKKNGLFGNLIALSLGLTPNFKSNFDLAEDAKLQLSKDTYDDDLDNLLAQIGDQYADLFLAAKNLSDAILLSDILRVNTEITKAPLSASMIKRYDEHHQDLTLLKALVRQQLPEKYKEIFFDQSKNGYAGYIDGGASQEEFYKFIKPILEKMDGTEELLVKLNREDLLRKQRTFDNGSIPHQIHLGELHAILRRQEDFYPFLKDNREKIEKILTFRIPYYVGPLARGNSRFAWMTRKSEETITPWNFEEVVDKGASAQSFIERMTNFDKNLPNEKVLPKHSLLYEYFTVYNELTKVKYVTEGMRKPAFLSGEQKKAIVDLLFKTNRKVTVKQLKEDYFKKIECFDSVEISGVEDRFNASLGTYHDLLKIIKDKDFLDNEENEDILEDIVLTLTLFEDREMIEERLKTYAHLFDDKVMKQLKRRRYTGWGRLSRKLINGIRDKQSGKTILDFLKSDGFANRNFMQLIHDDSLTFKEDIQKAQVSGQGDSLHEHIANLAGSPAIKKGILQTVKVVDELVKVMGRHKPENIVIEMARENQTTQKGQKNSRERMKRIEEGIKELGSQILKEHPVENTQLQNEKLYLYYLQNGRDMYVDQELDINRLSDYDVDHIVPQSFLKDDSIDNKVLTRSDKNRGKSDNVPSEEVVKKMKNYWRQLLNAKLITQRKFDNLTKAERGGLSELDKAGFIKRQLVETRQITKHVAQILDSRMNTKYDENDKLIREVKVITLKSKLVSDFRKDFQFYKVREINNYHHAHDAYLNAVVGTALIKKYPKLESEFVYGDYKVYDVRKMIAKSEQEIGKATAKYFFYSNIMNFFKTEITLANGEIRKRPLIETNGETGEIVWDKGRDFATVRKVLSMPQVNIVKKTEVQTGGFSKESIRPKRNSDKLIARKKDWDPKKYGGFVSPTVAYSVLVVAKVEKGKSKKLKSVKELLGITIMERSSFEKNPIDFLEAKGYKEVKKDLIIKLPKYSLFELENGRKRMLASARFLQKGNELALPSKYVNFLYLASHYEKLKGSPEDNEQKQLFVEQHKHYLDEIIEQISEFSKRVILADANLDKVLSAYNKHRDKPIREQAENIIHLFTLTNLGAPRAFKYFDTTIDRKVYRSTKEVLDATLIHQSITGLYETRIDLSQLGGDSGGSGGSGGSTNLSDIIEKETGKQLVIQESILMLPEEVEEVIGNKPESDILVHTAYDESTDENVMLLTSDAPEYKPWALVIQDSNGENKIKMLSGGSGGSGGSTNLSDIIEKETGKQLVIQESILMLPEEVEEVIGNKPESDILVHTAYDESTDENVMLLTSDAPEYKPWALVIQDSNGENKIKMLSGGSKRTADGSEFEPKKKRKV

SEQ ID NO: 3679 - protein, 1874 aa, synthetic construct
MKRTADGSEFESPKKKRKVSSETGPVAVDPTLRRRIEPHEFEVFFDPRELRKETCLLYEINWGGRHSIWRHTSQNTNKHVEVNFIEKFTTERYFCPNTRCSITWFLSYSPCGECSRAITEFLSRYPHVTLFIYIARLYHHADPENRQGLRDLISSGVTIQIMTEQESGYCWRNFVNYSPSNEAHWPRYPHLWVRLYVLELYCIILGLPPCLNILRRKQPQLTFFTIALQSCHYQRLPPHILWATGLKSGGSSGGSSGSETPGTSESATPESSGGSSGGSEIGKATAKYFFYSNIMNFFKTEITLANGEIRKRPLIETNGETGEIVWDKGRDFATVRKVLSMPQVNIVKKTEVQTGGFSKESILPKRNSDKLIARKKDWDPKKYGGFDSPTVAYSVLVVAKVEKGKSKKLKSVKELLGITIMERSSFEKNPIDFLEAKGYKEVKKDLIIKLPKYSLFELENGRKRMLASAGELQKGNELALPSKYVNFLYLASHYEKLKGSPEDNEQKQLFVEQHKHYLDEIIEQISEFSKRVILADANLDKVLSAYNKHRDKPIREQAENIIHLFTLTNLGAPAAFKYFDTTIDRKRYTSTKEVLDATLIHQSITGLYETRIDLSQLGGDGGSGGSGGSGGSGGSGGSGGMDKKYSIGLAIGTNSVGWAVITDEYKVPSKKFKVLGNTDRHSIKKNLIGALLFDSGETAEATRLKRTARRRYTRRKNRICYLQEIFSNEMAKVDDSFFHRLEESFLVEEDKKHERHPIFGNIVDEVAYHEKYPTIYHLRKKLVDSTDKADLRLIYLALAHMIKFRGHFLIEGDLNPDNSDVDKLFIQLVQTYNQLFEENPINASGVDAKAILSARLSKSRRLENLIAQLPGEKKNGLFGNLIALSLGLTPNFKSNFDLAEDAKLQLSKDTYDDDLDNLLAQIGDQYADLFLAAKNLSDAILLSDILRVNTEITKAPLSASMIKRYDEHHQDLTLLKALVRQQLPEKYKEIFFDQSKNGYAGYIDGGASQEEFYKFIKPILEKMDGTEELLVKLNREDLLRKQRTFDNGSIPHQIHLGELHAILRRQEDFYPFLKDNREKIEKILTFRIPYYVGPLARGNSRFAWMTRKSEETITPWNFEEVVDKGASAQSFIERMTNFDKNLPNEKVLPKHSLLYEYFTVYNELTKVKYVTEGMRKPAFLSGEQKKAIVDLLFKTNRKVTVKQLKEDYFKKIECFDSVEISGVEDRFNASLGTYHDLLKIIKDKDFLDNEENEDILEDIVLTLTLFEDREMIEERLKTYAHLFDDKVMKQLKRRRYTGWGRLSRKLINGIRDKQSGKTILDFLKSDGFANRNFMQLIHDDSLTFKEDIQKAQVSGQGDSLHEHIANLAGSPAIKKGILQTVKVVDELVKVMGRHKPENIVIEMARENQTTQKGQKNSRERMKRIEEGIKELGSQILKEHPVENTQLQNEKLYLYYLQNGRDMYVDQELDINRLSDYDVDHIVPQSFLKDDSIDNKVLTRSDKNRGKSDNVPSEEVVKKMKNYWRQLLNAKLITQRKFDNLTKAERGGLSELDKAGFIKRQLVETRQITKHVAQILDSRMNTKYDENDKLIREVKVITLKSKLVSDFRKDFQFYKVREINNYHHAHDAYLNAVVGTALIKKYPKLESEFVYGDYKVYDVRKMIAKSEQSGGSGGSGGSTNLSDIIEKETGKQLVIQESILMLPEEVEEVIGNKPESDILVHTAYDESTDENVMLLTSDAPEYKPWALVIQDSNGENKIKMLSGGSGGSGGSTNLSDIIEKETGKQLVIQESILMLPEEVEEVIGNKPESDILVHTAYDESTDENVMLLTSDAPEYKPWALVIQDSNGENKIKMLSGGSKRTADGSEFEPKKKRKV

SEQ ID NO: 3680 - protein, 1874 aa, synthetic construct
MKRTADGSEFESPKKKRKVSSETGPVAVDPTLRRRIEPHEFEVFFDPRELRKETCLLYEINWGGRHSIWRHTSQNTNKHVEVNFIEKFTTERYFCPNTRCSITWFLSYSPCGECSRAITEFLSRYPHVTLFIYIARLYHHADPRNRQGLEDLISSGVTIQIMTEQESGYCWRNFVNYSPSNEAHWPRYPHLWVRLYVLELYCIILGLPPCLNILRRKQPQLTFFTIALQSCHYQRLPPHILWATGLKSGGSSGGSSGSETPGTSESATPESSGGSSGGSEIGKATAKYFFYSNIMNFFKTEITLANGEIRKRPLIETNGETGEIVWDKGRDFATVRKVLSMPQVNIVKKTEVQTGGFSKESILPKRNSDKLIARKKDWDPKKYGGFDSPTVAYSVLVVAKVEKGKSKKLKSVKELLGITIMERSSFEKNPIDFLEAKGYKEVKKDLIIKLPKYSLFELENGRKRMLASAGELQKGNELALPSKYVNFLYLASHYEKLKGSPEDNEQKQLFVEQHKHYLDEIIEQISEFSKRVILADANLDKVLSAYNKHRDKPIREQAENIIHLFTLTNLGAPAAFKYFDTTIDRKRYTSTKEVLDATLIHQSITGLYETRIDLSQLGGDGGSGGSGGSGGSGGSGGSGGMDKKYSIGLAIGTNSVGWAVITDEYKVPSKKFKVLGNTDRHSIKKNLIGALLFDSGETAEATRLKRTARRRYTRRKNRICYLQEIFSNEMAKVDDSFFHRLEESFLVEEDKKHERHPIFGNIVDEVAYHEKYPTIYHLRKKLVDSTDKADLRLIYLALAHMIKFRGHFLIEGDLNPDNSDVDKLFIQLVQTYNQLFEENPINASGVDAKAILSARLSKSRRLENLIAQLPGEKKNGLFGNLIALSLGLTPNFKSNFDLAEDAKLQLSKDTYDDDLDNLLAQIGDQYADLFLAAKNLSDAILLSDILRVNTEITKAPLSASMIKRYDEHHQDLTLLKALVRQQLPEKYKEIFFDQSKNGYAGYIDGGASQEEFYKFIKPILEKMDGTEELLVKLNREDLLRKQRTFDNGSIPHQIHLGELHAILRRQEDFYPFLKDNREKIEKILTFRIPYYVGPLARGNSRFAWMTRKSEETITPWNFEEVVDKGASAQSFIERMTNFDKNLPNEKVLPKHSLLYEYFTVYNELTKVKYVTEGMRKPAFLSGEQKKAIVDLLFKTNRKVTVKQLKEDYFKKIECFDSVEISGVEDRFNASLGTYHDLLKIIKDKDFLDNEENEDILEDIVLTLTLFEDREMIEERLKTYAHLFDDKVMKQLKRRRYTGWGRLSRKLINGIRDKQSGKTILDFLKSDGFANRNFMQLIHDDSLTFKEDIQKAQVSGQGDSLHEHIANLAGSPAIKKGILQTVKVVDELVKVMGRHKPENIVIEMARENQTTQKGQKNSRERMKRIEEGIKELGSQILKEHPVENTQLQNEKLYLYYLQNGRDMYVDQELDINRLSDYDVDHIVPQSFLKDDSIDNKVLTRSDKNRGKSDNVPSEEVVKKMKNYWRQLLNAKLITQRKFDNLTKAERGGLSELDKAGFIKRQLVETRQITKHVAQILDSRMNTKYDENDKLIREVKVITLKSKLVSDFRKDFQFYKVREINNYHHAHDAYLNAVVGTALIKKYPKLESEFVYGDYKVYDVRKMIAKSEQSGGSGGSGGSTNLSDIIEKETGKQLVIQESILMLPEEVEEVIGNKPESDILVHTAYDESTDENVMLLTSDAPEYKPWALVIQDSNGENKIKMLSGGSGGSGGSTNLSDIIEKETGKQLVIQESILMLPEEVEEVIGNKPESDILVHTAYDESTDENVMLLTSDAPEYKPWALVIQDSNGENKIKMLSGGSKRTADGSEFEPKKKRKV

SEQ ID NO: 3681 - protein, 1874 aa, synthetic construct
MKRTADGSEFESPKKKRKVSSETGPVAVDPTLRRRIEPHEFEVFFDPRELRKETCLLYEINWGGRHSIWRHTSQNTNKHVEVNFIEKFTTERYFCPNTRCSITWFLSYSPCGECSRAITEFLSRYPHVTLFIYIARLYHHADPENRQGLEDLISSGVTIQIMTEQESGYCWRNFVNYSPSNEAHWPRYPHLWVRLYVLELYCIILGLPPCLNILRRKQPQLTFFTIALQSCHYQRLPPHILWATGLKSGGSSGGSSGSETPGTSESATPESSGGSSGGSEIGKATAKYFFYSNIMNFFKTEITLANGEIRKRPLIETNGETGEIVWDKGRDFATVRKVLSMPQVNIVKKTEVQTGGFSKESILPKRNSDKLIARKKDWDPKKYGGFDSPTVAYSVLVVAKVEKGKSKKLKSVKELLGITIMERSSFEKNPIDFLEAKGYKEVKKDLIIKLPKYSLFELENGRKRMLASAGELQKGNELALPSKYVNFLYLASHYEKLKGSPEDNEQKQLFVEQHKHYLDEIIEQISEFSKRVILADANLDKVLSAYNKHRDKPIREQAENIIHLFTLTNLGAPAAFKYFDTTIDRKRYTSTKEVLDATLIHQSITGLYETRIDLSQLGGDGGSGGSGGSGGSGGSGGSGGMDKKYSIGLAIGTNSVGWAVITDEYKVPSKKFKVLGNTDRHSIKKNLIGALLFDSGETAEATRLKRTARRRYTRRKNRICYLQEIFSNEMAKVDDSFFHRLEESFLVEEDKKHERHPIFGNIVDEVAYHEKYPTIYHLRKKLVDSTDKADLRLIYLALAHMIKFRGHFLIEGDLNPDNSDVDKLFIQLVQTYNQLFEENPINASGVDAKAILSARLSKSRRLENLIAQLPGEKKNGLFGNLIALSLGLTPNFKSNFDLAEDAKLQLSKDTYDDDLDNLLAQIGDQYADLFLAAKNLSDAILLSDILRVNTEITKAPLSASMIKRYDEHHQDLTLLKALVRQQLPEKYKEIFFDQSKNGYAGYIDGGASQEEFYKFIKPILEKMDGTEELLVKLNREDLLRKQRTFDNGSIPHQIHLGELHAILRRQEDFYPFLKDNREKIEKILTFRIPYYVGPLARGNSRFAWMTRKSEETITPWNFEEVVDKGASAQSFIERMTNFDKNLPNEKVLPKHSLLYEYFTVYNELTKVKYVTEGMRKPAFLSGEQKKAIVDLLFKTNRKVTVKQLKEDYFKKIECFDSVEISGVEDRFNASLGTYHDLLKIIKDKDFLDNEENEDILEDIVLTLTLFEDREMIEERLKTYAHLFDDKVMKQLKRRRYTGWGRLSRKLINGIRDKQSGKTILDFLKSDGFANRNFMQLIHDDSLTFKEDIQKAQVSGQGDSLHEHIANLAGSPAIKKGILQTVKVVDELVKVMGRHKPENIVIEMARENQTTQKGQKNSRERMKRIEEGIKELGSQILKEHPVENTQLQNEKLYLYYLQNGRDMYVDQELDINRLSDYDVDHIVPQSFLKDDSIDNKVLTRSDKNRGKSDNVPSEEVVKKMKNYWRQLLNAKLITQRKFDNLTKAERGGLSELDKAGFIKRQLVETRQITKHVAQILDSRMNTKYDENDKLIREVKVITLKSKLVSDFRKDFQFYKVREINNYHHAHDAYLNAVVGTALIKKYPKLESEFVYGDYKVYDVRKMIAKSEQSGGSGGSGGSTNLSDIIEKETGKQLVIQESILMLPEEVEEVIGNKPESDILVHTAYDESTDENVMLLTSDAPEYKPWALVIQDSNGENKIKMLSGGSGGSGGSTNLSDIIEKETGKQLVIQESILMLPEEVEEVIGNKPESDILVHTAYDESTDENVMLLTSDAPEYKPWALVIQDSNGENKIKMLSGGSKRTADGSEFEPKKKRKV

SEQ ID NO: 3682 - protein, 1874 aa, synthetic construct
MKRTADGSEFESPKKKRKVSSETGPVAVDPTLRRRIEPHEFEVFFDPRELRKETCLLYEINWGGRHSIWRHTSQNTNKHVEVNFIEKFTTERYFCPNTRCSITWFLSWSPCGECSRAITEFLSRYPHVTLFIYIARLYHHADPENRQGLEDLISSGVTIQIMTEQESGYCWRNFVNYSPSNEAHWPRYPHLWVRLYVLELYCIILGLPPCLNILRRKQPQLTFFTIALQSCHYQRLPPHILWATGLKSGGSSGGSSGSETPGTSESATPESSGGSSGGSEIGKATAKYFFYSNIMNFFKTEITLANGEIRKRPLIETNGETGEIVWDKGRDFATVRKVLSMPQVNIVKKTEVQTGGFSKESILPKRNSDKLIARKKDWDPKKYGGFDSPTVAYSVLVVAKVEKGKSKKLKSVKELLGITIMERSSFEKNPIDFLEAKGYKEVKKDLIIKLPKYSLFELENGRKRMLASAGELQKGNELALPSKYVNFLYLASHYEKLKGSPEDNEQKQLFVEQHKHYLDEIIEQISEFSKRVILADANLDKVLSAYNKHRDKPIREQAENIIHLFTLTNLGAPAAFKYFDTTIDRKRYTSTKEVLDATLIHQSITGLYETRIDLSQLGGDGGSGGSGGSGGSGGSGGSGGMDKKYSIGLAIGTNSVGWAVITDEYKVPSKKFKVLGNTDRHSIKKNLIGALLFDSGETAEATRLKRTARRRYTRRKNRICYLQEIFSNEMAKVDDSFFHRLEESFLVEEDKKHERHPIFGNIVDEVAYHEKYPTIYHLRKKLVDSTDKADLRLIYLALAHMIKFRGHFLIEGDLNPDNSDVDKLFIQLVQTYNQLFEENPINASGVDAKAILSARLSKSRRLENLIAQLPGEKKNGLFGNLIALSLGLTPNFKSNFDLAEDAKLQLSKDTYDDDLDNLLAQIGDQYADLFLAAKNLSDAILLSDILRVNTEITKAPLSASMIKRYDEHHQDLTLLKALVRQQLPEKYKEIFFDQSKNGYAGYIDGGASQEEFYKFIKPILEKMDGTEELLVKLNREDLLRKQRTFDNGSIPHQIHLGELHAILRRQEDFYPFLKDNREKIEKILTFRIPYYVGPLARGNSRFAWMTRKSEETITPWNFEEVVDKGASAQSFIERMTNFDKNLPNEKVLPKHSLLYEYFTVYNELTKVKYVTEGMRKPAFLSGEQKKAIVDLLFKTNRKVTVKQLKEDYFKKIECFDSVEISGVEDRFNASLGTYHDLLKIIKDKDFLDNEENEDILEDIVLTLTLFEDREMIEERLKTYAHLFDDKVMKQLKRRRYTGWGRLSRKLINGIRDKQSGKTILDFLKSDGFANRNFMQLIHDDSLTFKEDIQKAQVSGQGDSLHEHIANLAGSPAIKKGILQTVKVVDELVKVMGRHKPENIVIEMARENQTTQKGQKNSRERMKRIEEGIKELGSQILKEHPVENTQLQNEKLYLYYLQNGRDMYVDQELDINRLSDYDVDHIVPQSFLKDDSIDNKVLTRSDKNRGKSDNVPSEEVVKKMKNYWRQLLNAKLITQRKFDNLTKAERGGLSELDKAGFIKRQLVETRQITKHVAQILDSRMNTKYDENDKLIREVKVITLKSKLVSDFRKDFQFYKVREINNYHHAHDAYLNAVVGTALIKKYPKLESEFVYGDYKVYDVRKMIAKSEQSGGSGGSGGSTNLSDIIEKETGKQLVIQESILMLPEEVEEVIGNKPESDILVHTAYDESTDENVMLLTSDAPEYKPWALVIQDSNGENKIKMLSGGSGGSGGSTNLSDIIEKETGKQLVIQESILMLPEEVEEVIGNKPESDILVHTAYDESTDENVMLLTSDAPEYKPWALVIQDSNGENKIKMLSGGSKRTADGSEFEPKKKRKV

SEQ ID NO: 3683 - protein, 1874 aa, synthetic construct
MKRTADGSEFESPKKKRKVSSETGPVAVDPTLRRRIEPHEFEVFFDPRELAAETCLLYEINWGGRHSIWRHTSQNTNKHVEVNFIEKFTTERYFCPNTRCSITWFLSWSPCGECSRAITEFLSRYPHVTLFIYIARLYHHADPRNRQGLRDLISSGVTIQIMTEQESGYCWRNFVNYSPSNEAHWPRYPHLWVRLYVLELYCIILGLPPCLNILRRKQPQLTFFTIALQSCHYQRLPPHILWATGLKSGGSSGGSSGSETPGTSESATPESSGGSSGGSEIGKATAKYFFYSNIMNFFKTEITLANGEIRKRPLIETNGETGEIVWDKGRDFATVRKVLSMPQVNIVKKTEVQTGGFSKESILPKRNSDKLIARKKDWDPKKYGGFDSPTVAYSVLVVAKVEKGKSKKLKSVKELLGITIMERSSFEKNPIDFLEAKGYKEVKKDLIIKLPKYSLFELENGRKRMLASAGELQKGNELALPSKYVNFLYLASHYEKLKGSPEDNEQKQLFVEQHKHYLDEIIEQISEFSKRVILADANLDKVLSAYNKHRDKPIREQAENIIHLFTLTNLGAPAAFKYFDTTIDRKRYTSTKEVLDATLIHQSITGLYETRIDLSQLGGDGGSGGSGGSGGSGGSGGSGGMDKKYSIGLAIGTNSVGWAVITDEYKVPSKKFKVLGNTDRHSIKKNLIGALLFDSGETAEATRLKRTARRRYTRRKNRICYLQEIFSNEMAKVDDSFFHRLEESFLVEEDKKHERHPIFGNIVDEVAYHEKYPTIYHLRKKLVDSTDKADLRLIYLALAHMIKFRGHFLIEGDLNPDNSDVDKLFIQLVQTYNQLFEENPINASGVDAKAILSARLSKSRRLENLIAQLPGEKKNGLFGNLIALSLGLTPNFKSNFDLAEDAKLQLSKDTYDDDLDNLLAQIGDQYADLFLAAKNLSDAILLSDILRVNTEITKAPLSASMIKRYDEHHQDLTLLKALVRQQLPEKYKEIFFDQSKNGYAGYIDGGASQEEFYKFIKPILEKMDGTEELLVKLNREDLLRKQRTFDNGSIPHQIHLGELHAILRRQEDFYPFLKDNREKIEKILTFRIPYYVGPLARGNSRFAWMTRKSEETITPWNFEEVVDKGASAQSFIERMTNFDKNLPNEKVLPKHSLLYEYFTVYNELTKVKYVTEGMRKPAFLSGEQKKAIVDLLFKTNRKVTVKQLKEDYFKKIECFDSVEISGVEDRFNASLGTYHDLLKIIKDKDFLDNEENEDILEDIVLTLTLFEDREMIEERLKTYAHLFDDKVMKQLKRRRYTGWGRLSRKLINGIRDKQSGKTILDFLKSDGFANRNFMQLIHDDSLTFKEDIQKAQVSGQGDSLHEHIANLAGSPAIKKGILQTVKVVDELVKVMGRHKPENIVIEMARENQTTQKGQKNSRERMKRIEEGIKELGSQILKEHPVENTQLQNEKLYLYYLQNGRDMYVDQELDINRLSDYDVDHIVPQSFLKDDSIDNKVLTRSDKNRGKSDNVPSEEVVKKMKNYWRQLLNAKLITQRKFDNLTKAERGGLSELDKAGFIKRQLVETRQITKHVAQILDSRMNTKYDENDKLIREVKVITLKSKLVSDFRKDFQFYKVREINNYHHAHDAYLNAVVGTALIKKYPKLESEFVYGDYKVYDVRKMIAKSEQSGGSGGSGGSTNLSDIIEKETGKQLVIQESILMLPEEVEEVIGNKPESDILVHTAYDESTDENVMLLTSDAPEYKPWALVIQDSNGENKIKMLSGGSGGSGGSTNLSDIIEKETGKQLVIQESILMLPEEVEEVIGNKPESDILVHTAYDESTDENVMLLTSDAPEYKPWALVIQDSNGENKIKMLSGGSKRTADGSEFEPKKKRKV

SEQ ID NO: 3684 - protein, 229 aa, Rattus sp. [sequence omitted]

SEQ ID NO: 3685 - protein, 236 aa, Homo sapiens; identical to SEQ ID NO: 48

SEQ ID NO: 3686 - protein, 200 aa, Homo sapiens
MSEASPASGPRHLMDPHIFTSNFNNGIGRHKTYLCYEVERLDNGTSVKMDQHRGFLHNQAKNLLCGFYGRHAELRFLDLVPSLQLDPAQIYRVTWFISWSPCFSWGCAGEVRAFLQENTHVRLRIFAARIYDYDPLYKEALQMLRDAGAQVSIMTYDEFKHCWDTFVDHQGCPFQPWDGLDEHSQALSGRLRAILQNQGN

SEQ ID NO: 3687 - protein, 382 aa, Homo sapiens; identical to SEQ ID NO: 37

SEQ ID NO: 3688 - protein, 384 aa, Homo sapiens; identical to SEQ ID NO: 36

SEQ ID NO: 3689 - protein, 199 aa, synthetic construct
MEASPASGPRHLMDPHIFTSNFNNGIGRHKTYLCYEVERLDNGTSVKMDQHRGFLHGQAKNLLCGFYGRHAELRFLDLVPSLQLDPAQIYRVTWFISWSPCFSWGCAGEVRAFLQENTHVRLRIFAARIYDYDPLYKEALQMLRDAGAQVSIMTYDEFKHCWDTFVDHQGCPFQPWDGLDEHSQALSGRLRAILQNQGN

SEQ ID NO: 3690 - protein, 208 aa, synthetic construct
MTDAEYVRIHEKLDIYTFKKQFSNNKKSVSHRCYVLFELKRRGERRACFWGYAVNKPQSGTERGIHAEIFSIRKVEEYLRDNPGQFTINWYSSWSPCADCAEKILEWYNQELRGNGHTLKIWVCKLYYEKNARNQIGLWNLRDNGVGLNVMVSEHYQCCRKIFIQSSHNQLNENRWLEKTLKRAEKRRSELSIMFQVKILHTTKSPAV

SEQ ID NO: 3691 - protein, 229 aa, synthetic construct
MSSKTGPVAVDPTLRRRIEPHEFEVFFDPRELRKETCLLYEINWGGRHSIWRHTSQNTNKHVEVNFIEKFTTERYFCPNTRCSITWFLSWSPCGECSRAITEFLSRYPNVTLFIYIARLYHLANPRNRQGLRDLISSGVTIQIMTEQESGYCWHNFVNYSPSNESHWPRYPHLWVRLYVLELYCIILGLPPCLNILRRKQSQLTSFTIALQSCHYQRLPPHILWATGLK

SEQ ID NO: 3692 - protein, 229 aa, synthetic construct
MSSETGPVAVDPTLRRRIEPHEFEVFFDPRELRKETCLLYEINWGGRHSIWRHTSQNTNKHVEVNFIEKFTTERYFCPNTRCSITWFLSYSPCGECSRAITEFLSRYPHVTLFIYIARLYHHADPENRQGLRDLISSGVTIQIMTEQESGYCWRNFVNYSPSNEAHWPRYPHLWVRLYVLELYCIILGLPPCLNILRRKQPQLTFFTIALQSCHYQRLPPHILWATGLK

SEQ ID NO: 3693 - protein, 229 aa, synthetic construct
MSSETGPVAVDPTLRRRIEPHEFEVFFDPRELRKETCLLYEINWGGRHSIWRHTSQNTNKHVEVNFIEKFTTERYFCPNTRCSITWFLSYSPCGECSRAITEFLSRYPHVTLFIYIARLYHHADPRNRQGLEDLISSGVTIQIMTEQESGYCWRNFVNYSPSNEAHWPRYPHLWVRLYVLELYCIILGLPPCLNILRRKQPQLTFFTIALQSCHYQRLPPHILWATGLK

SEQ ID NO: 3694 - protein, 229 aa, synthetic construct
MSSETGPVAVDPTLRRRIEPHEFEVFFDPRELRKETCLLYEINWGGRHSIWRHTSQNTNKHVEVNFIEKFTTERYFCPNTRCSITWFLSYSPCGECSRAITEFLSRYPHVTLFIYIARLYHHADPENRQGLEDLISSGVTIQIMTEQESGYCWRNFVNYSPSNEAHWPRYPHLWVRLYVLELYCIILGLPPCLNILRRKQPQLTFFTIALQSCHYQRLPPHILWATGLK

SEQ ID NO: 3695 - protein, 229 aa, synthetic construct
MSSETGPVAVDPTLRRRIEPHEFEVFFDPRELRKETCLLYEINWGGRHSIWRHTSQNTNKHVEVNFIEKFTTERYFCPNTRCSITWFLSWSPCGECSRAITEFLSRYPHVTLFIYIARLYHHADPENRQGLEDLISSGVTIQIMTEQESGYCWRNFVNYSPSNEAHWPRYPHLWVRLYVLELYCIILGLPPCLNILRRKQPQLTFFTIALQSCHYQRLPPHILWATGLK

SEQ ID NO: 3696 - protein, 229 aa, synthetic construct
MSSETGPVAVDPTLRRRIEPHEFEVFFDPRELAKETCLLYEINWGGRHSIWRHTSQNTNKHVEVNFIEKFTTERYFCPNTRCSITWFLSWSPCGECSRAITEFLSRYPHVTLFIYIARLYHHADPRNRQGLRDLISSGVTIQIMTEQESGYCWRNFVNYSPSNEAHWPRYPHLWVRLYVLELYCIILGLPPCLNILRRKQPQLTFFTIALQSCHYQRLPPHILWATGLK

SEQ ID NO: 3697 - protein, 229 aa, synthetic construct
MSSETGPVAVDPTLRRRIEPHEFEVFFDPRELAAETCLLYEINWGGRHSIWRHTSQNTNKHVEVNFIEKFTTERYFCPNTRCSITWFLSWSPCGECSRAITEFLSRYPHVTLFIYIARLYHHADPRNRQGLRDLISSGVTIQIMTEQESGYCWRNFVNYSPSNEAHWPRYPHLWVRLYVLELYCIILGLPPCLNILRRKQPQLTFFTIALQSCHYQRLPPHILWATGLK

SEQ ID NO: 3698 - protein, 229 aa, synthetic construct
MSSETGPVAVDPTLRRRIEPHEFEVFFDPRELAAETCLLYEINWGGRHSIWRHTSQNTNKHVEVNFIEKFTTERYFCPNTRCSITWFLSWSPCGECSRAITEFLSRYPHVTLFIYIARLYHLANPRNRQGLRDLISSGVTIQIMTEQESGYCWRNFVNYSPSNEAHWPRYPHLWVRLYVLELYCIILGLPPCLNILRRKQPQLTFFTIALQSCHYQRLPPHILWATGLK

SEQ ID NO: 3699 - protein, 162 aa, synthetic construct
MFERNYDPRELRKETYLLYEIKWGKSGKLWRHWCQNNRTQHAEVYFLENIFNARRFNPSTHCSITWYLSWSPCAECSQKIVDFLKEHPNVNLEIYVARLYYHEDERNRQGLRDLVNSGVTIRIMDLPDYNYCWKTFVSDQGGDEDYWPGHFAPWIKQYSLKL

SEQ ID NO: 3700 - protein, 162 aa, synthetic construct
MFERNYDPRELRKETYLLYEIKWGKSGKLWRHWCQNNRTQHAEVYFLENIFNARRFNPSTHCSITWYLSWSPCAECSQKIVDFLKEHPNVNLEIYVARLYYPENERNRQGLRDLVNSGVTIRIMDLPDYNYCWKTFVSDQGGDEDYWPGHFAPWIKQYSLKL

SEQ ID NO: 3701 - skipped

SEQ ID NO: 3702 - protein, 1853 aa, synthetic construct; identical to SEQ ID NO: 3658

SEQ ID NO: 3703 - protein, 1824 aa, synthetic construct
MSSETGPVAVDPTLRRRIEPHEFEVFFDPRELRKETCLLYEINWGGRHSIWRHTSQNTNKHVEVNFIEKFTTERYFCPNTRCSITWFLSWSPCGECSRAITEFLSRYPHVTLFIYIARLYHHADPRNRQGLRDLISSGVTIQIMTEQESGYCWRNFVNYSPSNEAHWPRYPHLWVRLYVLELYCIILGLPPCLNILRRKQPQLTFFTIALQSCHYQRLPPHILWATGLKSGGSSGGSSGSETPGTSESATPESSGGSSGGSDKKYSIGLAIGTNSVGWAVITDEYKVPSKKFKVLGNTDRHSIKKNLIGALLFDSGETAEATRLKRTARRRYTRRKNRICYLQEIFSNEMAKVDDSFFHRLEESFLVEEDKKHERHPIFGNIVDEVAYHEKYPTIYHLRKKLVDSTDKADLRLIYLALAHMIKFRGHFLIEGDLNPDNSDVDKLFIQLVQTYNQLFEENPINASGVDAKAILSARLSKSRRLENLIAQLPGEKKNGLFGNLIALSLGLTPNFKSNFDLAEDAKLQLSKDTYDDDLDNLLAQIGDQYADLFLAAKNLSDAILLSDILRVNTEITKAPLSASMIKRYDEHHQDLTLLKALVRQQLPEKYKEIFFDQSKNGYAGYIDGGASQEEFYKFIKPILEKMDGTEELLVKLNREDLLRKQRTFDNGSIPHQIHLGELHAILRRQEDFYPFLKDNREKIEKILTFRIPYYVGPLARGNSRFAWMTRKSEETITPWNFEEVVDKGASAQSFIERMTNFDKNLPNEKVLPKHSLLYEYFTVYNELTKVKYVTEGMRKPAFLSGEQKKAIVDLLFKTNRKVTVKQLKEDYFKKIECFDSVEISGVEDRFNASLGTYHDLLKIIKDKDFLDNEENEDILEDIVLTLTLFEDREMIEERLKTYAHLFDDKVMKQLKRRRYTGWGRLSRKLINGIRDKQSGKTILDFLKSDGFANRNFMQLIHDDSLTFKEDIQKAQVSGQGDSLHEHIANLAGSPAIKKGILQTVKVVDELVKVMGRHKPENIVIEMARENQTTQKGQKNSRERMKRIEEGIKELGSQILKEHPVENTQLQNEKLYLYYLQNGRDMYVDQELDINRLSDYDVDHIVPQSFLKDDSIDNKVLTRSDKNRGKSDNVPSEEVVKKMKNYWRQLLNAKLITQRKFDNLTKAERGGLSELDKAGFIKRQLVETRQITKHVAQILDSRMNTKYDENDKLIREVKVITLKSKLVSDFRKDFQFYKVREINNYHHAHDAYLNAVVGTALIKKYPKLESEFVYGDYKVYDVRKMIAKSEQEIGKATAKYFFYSNIMNFFKTEITLANGEIRKRPLIETNGETGEIVWDKGRDFATVRKVLSMPQVNIVKKTEVQTGGFSKESILPKRNSDKLIARKKDWDPKKYGGFDSPTVAYSVLVVAKVEKGKSKKLKSVKELLGITIMERSSFEKNPIDFLEAKGYKEVKKDLIIKLPKYSLFELENGRKRMLASAGELQKGNELALPSKYVNFLYLASHYEKLKGSPEDNEQKQLFVEQHKHYLDEIIEQISEFSKRVILADANLDKVLSAYNKHRDKPIREQAENIIHLFTLTNLGAPAAFKYFDTTIDRKRYTSTKEVLDATLIHQSITGLYETRIDLSQLGGDSGGSGGSGGSTNLSDIIEKETGKQLVIQESILMLPEEVEEVIGNKPESDILVHTAYDESTDENVMLLTSDAPEYKPWALVIQDSNGENKIKMLSGGSGGSGGSTNLSDIIEKETGKQLVIQESILMLPEEVEEVIGNKPESDILVHTAYDESTDENVMLLTSDAPEYKPWALVIQDSNGENKIKMLSGGSPKKKRK

SEQ ID NO: 3704 - protein, 1838 aa, synthetic construct
MHHHHHHHHGSGGSGSSETGPVAVDPTLRRRIEPHEFEVFFDPRELRKETCLLYEINWGGRHSIWRHTSQNTNKHVEVNFIEKFTTERYFCPNTRCSITWFLSWSPCGECSRAITEFLSRYPHVTLFIYIARLYHHADPRNRQGLRDLISSGVTIQIMTEQESGYCWRNFVNYSPSNEAHWPRYPHLWVRLYVLELYCIILGLPPCLNILRRKQPQLTFFTIALQSCHYQRLPPHILWATGLKSGGSSGGSSGSETPGTSESATPESSGGSSGGSDKKYSIGLAIGTNSVGWAVITDEYKVPSKKFKVLGNTDRHSIKKNLIGALLFDSGETAEATRLKRTARRRYTRRKNRICYLQEIFSNEMAKVDDSFFHRLEESFLVEEDKKHERHPIFGNIVDEVAYHEKYPTIYHLRKKLVDSTDKADLRLIYLALAHMIKFRGHFLIEGDLNPDNSDVDKLFIQLVQTYNQLFEENPINASGVDAKAILSARLSKSRRLENLIAQLPGEKKNGLFGNLIALSLGLTPNFKSNFDLAEDAKLQLSKDTYDDDLDNLLAQIGDQYADLFLAAKNLSDAILLSDILRVNTEITKAPLSASMIKRYDEHHQDLTLLKALVRQQLPEKYKEIFFDQSKNGYAGYIDGGASQEEFYKFIKPILEKMDGTEELLVKLNREDLLRKQRTFDNGSIPHQIHLGELHAILRRQEDFYPFLKDNREKIEKILTFRIPYYVGPLARGNSRFAWMTRKSEETITPWNFEEVVDKGASAQSFIERMTNFDKNLPNEKVLPKHSLLYEYFTVYNELTKVKYVTEGMRKPAFLSGEQKKAIVDLLFKTNRKVTVKQLKEDYFKKIECFDSVEISGVEDRFNASLGTYHDLLKIIKDKDFLDNEENEDILEDIVLTLTLFEDREMIEERLKTYAHLFDDKVMKQLKRRRYTGWGRLSRKLINGIRDKQSGKTILDFLKSDGFANRNFMQLIHDDSLTFKEDIQKAQVSGQGDSLHEHIANLAGSPAIKKGILQTVKVVDELVKVMGRHKPENIVIEMARENQTTQKGQKNSRERMKRIEEGIKELGSQILKEHPVENTQLQNEKLYLYYLQNGRDMYVDQELDINRLSDYDVDHIVPQSFLKDDSIDNKVLTRSDKNRGKSDNVPSEEVVKKMKNYWRQLLNAKLITQRKFDNLTKAERGGLSELDKAGFIKRQLVETRQITKHVAQILDSRMNTKYDENDKLIREVKVITLKSKLVSDFRKDFQFYKVREINNYHHAHDAYLNAVVGTALIKKYPKLESEFVYGDYKVYDVRKMIAKSEQEIGKATAKYFFYSNIMNFFKTEITLANGEIRKRPLIETNGETGEIVWDKGRDFATVRKVLSMPQVNIVKKTEVQTGGFSKESILPKRNSDKLIARKKDWDPKKYGGFDSPTVAYSVLVVAKVEKGKSKKLKSVKELLGITIMERSSFEKNPIDFLEAKGYKEVKKDLIIKLPKYSLFELENGRKRMLASAGELQKGNELALPSKYVNFLYLASHYEKLKGSPEDNEQKQLFVEQHKHYLDEIIEQISEFSKRVILADANLDKVLSAYNKHRDKPIREQAENIIHLFTLTNLGAPAAFKYFDTTIDRKRYTSTKEVLDATLIHQSITGLYETRIDLSQLGGDSGGSGGSGGSTNLSDIIEKETGKQLVIQESILMLPEEVEEVIGNKPESDILVHTAYDESTDENVMLLTSDAPEYKPWALVIQDSNGENKIKMLSGGSGGSGGSTNLSDIIEKETGKQLVIQESILMLPEEVEEVIGNKPESDILVHTAYDESTDENVMLLTSDAPEYKPWALVIQDSNGENKIKMLSGGSPKKKRK

SEQ ID NO: 3705 - protein, 1853 aa, synthetic construct; identical to SEQ ID NO: 3658

SEQ ID NO: 3706 - protein, 1853 aa, synthetic construct
MKRTADGSEFESPKKKRKVSSETGPVAVDPTLRRRIEPHEFEVFFDPRELRKETCLLYEIKWGTSHKIWRHSSKNTTKHVEVNFIEKFTSERHFCPSTSCSITWFLSWSPCGECSKAITEFLSQHPNVTLVIYVARLYHHMDQQNRQGLRDLVNSGVTIQIMTAPEYDYCWRNFVNYPPGKEAHWPRYPPLWMKLYALELHAGILGLPPCLNILRRKQPQLTFFTIALQSCHYQRLPPHILWATGLKSGGSSGGSSGSETPGTSESATPESSGGSSGGSDKKYSIGLAIGTNSVGWAVITDEYKVPSKKFKVLGNTDRHSIKKNLIGALLFDSGETAEATRLKRTARRRYTRRKNRICYLQEIFSNEMAKVDDSFFHRLEESFLVEEDKKHERHPIFGNIVDEVAYHEKYPTIYHLRKKLVDSTDKADLRLIYLALAHMIKFRGHFLIEGDLNPDNSDVDKLFIQLVQTYNQLFEENPINASGVDAKAILSARLSKSRRLENLIAQLPGEKKNGLFGNLIALSLGLTPNFKSNFDLAEDAKLQLSKDTYDDDLDNLLAQIGDQYADLFLAAKNLSDAILLSDILRVNTEITKAPLSASMIKRYDEHHQDLTLLKALVRQQLPEKYKEIFFDQSKNGYAGYIDGGASQEEFYKFIKPILEKMDGTEELLVKLNREDLLRKQRTFDNGSIPHQIHLGELHAILRRQEDFYPFLKDNREKIEKILTFRIPYYVGPLARGNSRFAWMTRKSEETITPWNFEEVVDKGASAQSFIERMTNFDKNLPNEKVLPKHSLLYEYFTVYNELTKVKYVTEGMRKPAFLSGEQKKAIVDLLFKTNRKVTVKQLKEDYFKKIECFDSVEISGVEDRFNASLGTYHDLLKIIKDKDFLDNEENEDILEDIVLTLTLFEDREMIEERLKTYAHLFDDKVMKQLKRRRYTGWGRLSRKLINGIRDKQSGKTILDFLKSDGFANRNFMQLIHDDSLTFKEDIQKAQVSGQGDSLHEHIANLAGSPAIKKGILQTVKVVDELVKVMGRHKPENIVIEMARENQTTQKGQKNSRERMKRIEEGIKELGSQILKEHPVENTQLQNEKLYLYYLQNGRDMYVDQELDINRLSDYDVDHIVPQSFLKDDSIDNKVLTRSDKNRGKSDNVPSEEVVKKMKNYWRQLLNAKLITQRKFDNLTKAERGGLSELDKAGFIKRQLVETRQITKHVAQILDSRMNTKYDENDKLIREVKVITLKSKLVSDFRKDFQFYKVREINNYHHAHDAYLNAVVGTALIKKYPKLESEFVYGDYKVYDVRKMIAKSEQEIGKATAKYFFYSNIMNFFKTEITLANGEIRKRPLIETNGETGEIVWDKGRDFATVRKVLSMPQVNIVKKTEVQTGGFSKESILPKRNSDKLIARKKDWDPKKYGGFDSPTVAYSVLVVAKVEKGKSKKLKSVKELLGITIMERSSFEKNPIDFLEAKGYKEVKKDLIIKLPKYSLFELENGRKRMLASAGELQKGNELALPSKYVNFLYLASHYEKLKGSPEDNEQKQLFVEQHKHYLDEIIEQISEFSKRVILADANLDKVLSAYNKHRDKPIREQAENIIHLFTLTNLGAPAAFKYFDTTIDRKRYTSTKEVLDATLIHQSITGLYETRIDLSQLGGDSGGSGGSGGSTNLSDIIEKETGKQLVIQESILMLPEEVEEVIGNKPESDILVHTAYDESTDENVMLLTSDAPEYKPWALVIQDSNGENKIKMLSGGSGGSGGSTNLSDIIEKETGKQLVIQESILMLPEEVEEVIGNKPESDILVHTAYDESTDENVMLLTSDAPEYKPWALVIQDSNGENKIKMLSGGSKRTADGSEFEPKKKRKV

SEQ ID NO: 3707 - protein, 1853 aa, synthetic construct
MKRTADGSEFESPKKKRKVSSETGPVAVDPTLRRRIEPHEFEVFFDPRELRKEACLLYEIKWGTSHKIWRNSGKNTTKHVEVNFIEKFTSERHFCPSISCSITWFLSWSPCWECSKAIREFLSQHPNVTLVIYVARLFQHMDQQNRQGLRDLVNSGVTIQIMTASEYDHCWRNFVNYPPGKEAHWPRYPPLWMKLYALELHAGILGLPPCLNILRRKQPQLTFFTIALQSCHYQRLPPHILWATGLKSGGSSGGSSGSETPGTSESATPESSGGSSGGSDKKYSIGLAIGTNSVGWAVITDEYKVPSKKFKVLGNTDRHSIKKNLIGALLFDSGETAEATRLKRTARRRYTRRKNRICYLQEIFSNEMAKVDDSFFHRLEESFLVEEDKKHERHPIFGNIVDEVAYHEKYPTIYHLRKKLVDSTDKADLRLIYLALAHMIKFRGHFLIEGDLNPDNSDVDKLFIQLVQTYNQLFEENPINASGVDAKAILSARLSKSRRLENLIAQLPGEKKNGLFGNLIALSLGLTPNFKSNFDLAEDAKLQLSKDTYDDDLDNLLAQIGDQYADLFLAAKNLSDAILLSDILRVNTEITKAPLSASMIKRYDEHHQDLTLLKALVRQQLPEKYKEIFFDQSKNGYAGYIDGGASQEEFYKFIKPILEKMDGTEELLVKLNREDLLRKQRTFDNGSIPHQIHLGELHAILRRQEDFYPFLKDNREKIEKILTFRIPYYVGPLARGNSRFAWMTRKSEETITPWNFEEVVDKGASAQSFIERMTNFDKNLPNEKVLPKHSLLYEYFTVYNELTKVKYVTEGMRKPAFLSGEQKKAIVDLLFKTNRKVTVKQLKEDYFKKIECFDSVEISGVEDRFNASLGTYHDLLKIIKDKDFLDNEENEDILEDIVLTLTLFEDREMIEERLKTYAHLFDDKVMKQLKRRRYTGWGRLSRKLINGIRDKQSGKTILDFLKSDGFANRNFMQLIHDDSLTFKEDIQKAQVSGQGDSLHEHIANLAGSPAIKKGILQTVKVVDELVKVMGRHKPENIVIEMARENQTTQKGQKNSRERMKRIEEGIKELGSQILKEHPVENTQLQNEKLYLYYLQNGRDMYVDQELDINRLSDYDVDHIVPQSFLKDDSIDNKVLTRSDKNRGKSDNVPSEEVVKKMKNYWRQLLNAKLITQRKFDNLTKAERGGLSELDKAGFIKRQLVETRQITKHVAQILDSRMNTKYDENDKLIREVKVITLKSKLVSDFRKDFQFYKVREINNYHHAHDAYLNAVVGTALIKKYPKLESEFVYGDYKVYDVRKMIAKSEQEIGKATAKYFFYSNIMNFFKTEITLANGEIRKRPLIETNGETGEIVWDKGRDFATVRKVLSMPQVNIVKKTEVQTGGFSKESILPKRNSDKLIARKKDWDPKKYGGFDSPTVAYSVLVVAKVEKGKSKKLKSVKELLGITIMERSSFEKNPIDFLEAKGYKEVKKDLIIKLPKYSLFELENGRKRMLASAGELQKGNELALPSKYVNFLYLASHYEKLKGSPEDNEQKQLFVEQHKHYLDEIIEQISEFSKRVILADANLDKVLSAYNKHRDKPIREQAENIIHLFTLTNLGAPAAFKYFDTTIDRKRYTSTKEVLDATLIHQSITGLYETRIDLSQLGGDSGGSGGSGGSTNLSDIIEKETGKQLVIQESILMLPEEVEEVIGNKPESDILVHTAYDESTDENVMLLTSDAPEYKPWALVIQDSNGENKIKMLSGGSGGSGGSTNLSDIIEKETGKQLVIQESILMLPEEVEEVIGNKPESDILVHTAYDESTDENVMLLTSDAPEYKPWALVIQDSNGENKIKMLSGGSKRTADGSEFEPKKKRKV

SEQ ID NO: 3708 - skipped

SEQ ID NO: 3709 - DNA, 684 bp, Rattus sp.
  source 1..684: mol_type = other DNA
tcctcagagactgggcctgtcgccgtcgatccaaccctgcgccgccggattgaacctcacgagtttgaagtgttctttgacccccgggagctgagaaaggagacatgcctgctgtacgagatcaactggggaggcaggcactccatctggaggcacacctctcagaacacaaataagcacgtggaggtgaacttcatcgagaagtttaccacagagcggtacttctgccccaataccagatgtagcatcacatggtttctgagctggtccccttgcggagagtgtagcagggccatcaccgagttcctgtccagatatccacacgtgacactgtttatctacatcgccaggctgtatcaccacgcagacccaaggaataggcagggcctgcgcgatctgatcagctccggcgtgaccatccagatcatgacagagcaggagtccggctactgctggcggaacttcgtgaattattctcctagcaacgaggcccactggcctaggtacccacacctgtgggtgcgcctgtacgtgctggagctgtattgcatcatcctgggcctgcccccttgtctgaatatcctgcggagaaagcagccccagctgaccttctttacaatcgccctgcagtcttgtcactatcagaggctgccaccccacatcctgtgggccacaggcctgaag

SEQ ID NO: 3710 - DNA, 686 bp, synthetic construct
  source 1..686: mol_type = other DNA
agcagtgaaaccggaccagtggcagtggacccaaccctgaggagacggattgagccccatgaatttgaagtgttctttgacccaagggagctgaggaaggagacatgcctgctgtacgagatcaagtggggcacaagccacaagatctggcgccacagctccaagaacaccacaaagcacgtggaagtgaatttcatcgagaagtttacctccgagcggcacttctgcccctctaccagctgttccatcacatggtttctgtcttggagcccttgcggcgagtgttccaaggccatcaccgagttcctgtctcagcaccctaacgtgaccctggtcatctacgtggcccggctgtatcaccacatggaccagcagaacaggcagggcctgcgcgatctggtgaattctggcgtgaccatccagatcatgacagccccagagtacgactattgctggcggaacttcgtgaattatccacctggcaaggaggcacactggccaagatacccacccctgtggatgaagctgtatgcactggagctgcacgcaggaatcctgggcctgcctccatgtctgaatatcctgcggagaaagcagccccagctgacatttttcaccattgctctgcagtcttgtcactatcagcggctgcctcctcatattctgtgggctacaggcctttgaaa

SEQ ID NO: 3711 - DNA, 686 bp, synthetic construct
  source 1..686: mol_type = other DNA
tcatcagaaacaggaccagtcgccgtggacccaacactgaggagaaggattgagccccatgaatttgaagtctttttcgaccccagggagctgaggaaggaggcatgcctgctgtacgagatcaagtggggcacaagccacaagatctggcgcaacagcggcaagaacaccacaaagcacgtggaagtgaatttcatcgagaagtttacctccgagcggcacttctgcccctctatcagctgttccatcacatggtttctgtcttggagcccttgctgggagtgttccaaggccatccgcgagttcctgtctcagcaccctaacgtgaccctggtcatctacgtggcccggctgtttcaacacatggaccagcagaacaggcagggcctgcgcgatctggtgaattctggcgtgaccatccagatcatgacagcctcagagtacgaccattgctggcggaacttcgtgaattatccacctggcaaggaggcacactggccaagatacccacccctgtggatgaagctgtatgcactggagctgcacgcaggaatcctgggcctgcctccatgtctgaatatcctgcggagaaagcagccccagctgacatttttcactatcgcactgcagagctgtcattaccagagactgcctcctcatatcctgtgggctacaggcctttgaaa

SEQ ID NO: 3712 - DNA, 686 bp, synthetic construct
  source 1..686: mol_type = other DNA
agcagcgagacaggacccgtggcagtggaccctacactgaggaggaggattgagcccgaatttttcaacaggaactacgaccccagagagctgcggaaggagacatacctgctgtatgagatcaagtggggcaaggagtccaagatctggcggcacacctctaacaatagaacacagcacgccgaggtgaacttcctggagaacttctttaatgagctgtactttaatccttctacccactgcagcatcacatggttcctgagctggtccccatgcggcgagtgttctaaggccatcgtggagtttctgaaggagcaccccaacgtgaatctggagatctacgtggccaggctgtatctgtgcgaggacgagaggaacaggcagggcctgcgggatctggtgaatagcggcgtgaccatcagaatcatgaacctgcctgactacaattattgttggcgcacattcgtgtcccaccagggaggcgacgaggattattggccaaggcactttgcaccatgggtgcgcctgtacgtgctggagctgtattgcatcatcctgggcctgcccccttgtctgaacatcctgcggagaaagcagccccagctgacattcttcaccatcgcactgcagagttgtcattaccagcgactgcctcctcatatcctgtgggctacaggcctttgaaa

SEQ ID NO: 3713 - DNA, 686 bp, synthetic construct
  source 1..686: mol_type = other DNA
tcatcagagaccggacctgtggcagtggacccaaccctgcgacggagaatcgagcccttttactttcagttcaacaacgacccaagagcctgccggagaaagacctacctgtgctatgagctgaagcaggacggctctacctgggtgtggaagcggacactgcacaacaagggcagacacgccgagatctgcttcctggagaagatcagctccctggagaagctggaccctgcccagcactacaggatcacatggtatatgtcttggagcccatgctccaactgtgcccagaagatcgtggattttctgaaggagcacccacacgtgaatctgcggatctacgtggccagactgtactatcacgaggaggagaggtatcaggagggcctgaggaacctgaggcgctccggcgtgtctatcagagtgatggacctgcccgatttcgagcactgctgggagacattcgtggataacggaggaggacctttccagccatggcccggcctggaggagctgaatagcaagcagctgtcccggagactgcaggcaggaatcctgggcctgcccccttgtctgaatatcctgaggcgcaagcagccccagctgacatttttcaccatcgcactgcagagttgtcattatcagcgactgcctcctcatatcctgtgggctacaggcctttgaaa

SEQ ID NO: 3714 - DNA, 686 bp, synthetic construct
  source 1..686: mol_type = other DNA
agcagcgagaccggacctgtggcagtggacccaaccctgagaagacgcattgagccatttcattttcagtttaacaacgaccccagagcctaccggagaaagacctacctgtgctatgagctgaagcaggacggctccacctgggtgctggatcggacactgagaaacaagggccggcacgccgagatctgtttcctggacaagatcaattcctgggagaggctggatcccgcccagcactaccgcgtgacatggtatatgagctggtccccttgctctaactgtgcccagcaggtggtggatttcctgaaggagcacccacacgtgaatctgcggatctttgccgccagactgtactatcacgagcagaggcgctatcaggagggcctgcggagcctgaggggaagcggagtgcctgtggccgtgatgaccctgccagacttcgagcactgctgggagacatttgtggatcacggcggccggccattccagccatgggacggcctggaggagctgaactctaggagcctgtcccggagactgcaggcaggaatcctgggcctgcccccttgtctgaatatcctgaggcgcaagcagccccagctgaccttttttaccatcgcactgcagagttgtcactaccagagactgcctcctcatatcctgtgggctacaggcctttgaaa

SEQ ID NO: 3715 - DNA, 1368 bp, Rattus sp.
  source 1..1368: mol_type = other DNA
tcctcagagactgggcctgtcgccgtcgatccaaccctgcgccgccggattgaacctcacgagtttgaagtgttctttgacccccgggagctgagaaaggagacatgcctgctgtacgagatcaactggggaggcaggcactccatctggaggcacacctctcagaacacaaataagcacgtggaggtgaacttcatcgagaagtttaccacagagcggtacttctgccccaataccagatgtagcatcacatggtttctgagctggtccccttgcggagagtgtagcagggccatcaccgagttcctgtccagatatccacacgtgacactgtttatctacatcgccaggctgtatcaccacgcagacccaaggaataggcagggcctgcgcgatctgatcagctccggcgtgaccatccagatcatgacagagcaggagtccggctactgctggcggaacttcgtgaattattctcctagcaacgaggcccactggcctaggtacccacacctgtgggtgcgcctgtacgtgctggagctgtattgcatcatcctgggcctgcccccttgtctgaatatcctgcggagaaagcagccccagctgaccttctttacaatcgccctgcagtcttgtcactatcagaggctgccaccccacatcctgtgggccacaggcctgaagtcctcagagactgggcctgtcgccgtcgatccaaccctgcgccgccggattgaacctcacgagtttgaagtgttctttgacccccgggagctgagaaaggagacatgcctgctgtacgagatcaactggggaggcaggcactccatctggaggcacacctctcagaacacaaataagcacgtggaggtgaacttcatcgagaagtttaccacagagcggtacttctgccccaataccagatgtagcatcacatggtttctgagctggtccccttgcggagagtgtagcagggccatcaccgagttcctgtccagatatccacacgtgacactgtttatctacatcgccaggctgtatcaccacgcagacccaaggaataggcagggcctgcgcgatctgatcagctccggcgtgaccatccagatcatgacagagcaggagtccggctactgctggcggaacttcgtgaattattctcctagcaacgaggcccactggcctaggtacccacacctgtgggtgcgcctgtacgtgctggagctgtattgcatcatcctgggcctgcccccttgtctgaatatcctgcggagaaagcagccccagctgaccttctttacaatcgccctgcagtcttgtcactatcagaggctgccaccccacatcctgtgggccacaggcctgaag

SEQ ID NO: 3716 - DNA, 684 bp, synthetic construct
  source 1..684: mol_type = other DNA
agcagtgaaaccggaccagtggcagtggacccaaccctgaggagacggattgagccccatgaatttgaagtgttctttgacccaagggagctgaggaaggagacatgcctgctgtacgagatcaagtggggcacaagccacaagatctggcgccacagctccaagaacaccacaaagcacgtggaagtgaatttcatcgagaagtttacctccgagcggcacttctgcccctctaccagctgttccatcacatggtttctgtcttggagcccttgcggcgagtgttccaaggccatcaccgagttcctgtctcagcaccctaacgtgaccctggtcatctacgtggcccggctgtatcaccacatggaccagcagaacaggcagggcctgcgcgatctggtgaattctggcgtgaccatccagatcatgacagccccagagtacgactattgctggcggaacttcgtgaattatccacctggcaaggaggcacactggccaagatacccacccctgtggatgaagctgtatgcactggagctgcacgcaggaatcctgggcctgcctccatgtctgaatatcctgcggagaaagcagccccagctgacatttttcaccattgctctgcagtcttgtcactatcagcggctgcctcctcatattctgtgggctacaggccttaaa

SEQ ID NO: 3717 - DNA, 684 bp, synthetic construct
  source 1..684: mol_type = other DNA
tcatcagaaacaggaccagtcgccgtggacccaacactgaggagaaggattgagccccatgaatttgaagtctttttcgaccccagggagctgaggaaggaggcatgcctgctgtacgagatcaagtggggcacaagccacaagatctggcgcaacagcggcaagaacaccacaaagcacgtggaagtgaatttcatcgagaagtttacctccgagcggcacttctgcccctctatcagctgttccatcacatggtttctgtcttggagcccttgctgggagtgttccaaggccatccgcgagttcctgtctcagcaccctaacgtgaccctggtcatctacgtggcccggctgtttcaacacatggaccagcagaacaggcagggcctgcgcgatctggtgaattctggcgtgaccatccagatcatgacagcctcagagtacgaccattgctggcggaacttcgtgaattatccacctggcaaggaggcacactggccaagatacccacccctgtggatgaagctgtatgcactggagctgcacgcaggaatcctgggcctgcctccatgtctgaatatcctgcggagaaagcagccccagctgacatttttcactatcgcactgcagagctgtcattaccagagactgcctcctcatatcctgtgggctacaggccttaaa

SEQ ID NO: 3718 - DNA, 684 bp, synthetic construct
  source 1..684: mol_type = other DNA
agcagcgagacaggacccgtggcagtggaccctacactgaggaggaggattgagcccgaatttttcaacaggaactacgaccccagagagctgcggaaggagacatacctgctgtatgagatcaagtggggcaaggagtccaagatctggcggcacacctctaacaatagaacacagcacgccgaggtgaacttcctggagaacttctttaatgagctgtactttaatccttctacccactgcagcatcacatggttcctgagctggtccccatgcggcgagtgttctaaggccatcgtggagtttctgaaggagcaccccaacgtgaatctggagatctacgtggccaggctgtatctgtgcgaggacgagaggaacaggcagggcctgcgggatctggtgaatagcggcgtgaccatcagaatcatgaacctgcctgactacaattattgttggcgcacattcgtgtcccaccagggaggcgacgaggattattggccaaggcactttgcaccatgggtgcgcctgtacgtgctggagctgtattgcatcatcctgggcctgcccccttgtctgaacatcctgcggagaaagcagccccagctgacattcttcaccatcgcactgcagagttgtcattaccagcgactgcctcctcatatcctgtgggctacaggccttaaa

SEQ ID NO: 3719 - DNA, 684 bp, synthetic construct
  source 1..684: mol_type = other DNA
tcatcagagaccggacctgtggcagtggacccaaccctgcgacggagaatcgagcccttttactttcagttcaacaacgacccaagagcctgccggagaaagacctacctgtgctatgagctgaagcaggacggctctacctgggtgtggaagcggacactgcacaacaagggcagacacgccgagatctgcttcctggagaagatcagctccctggagaagctggaccctgcccagcactacaggatcacatggtatatgtcttggagcccatgctccaactgtgcccagaagatcgtggattttctgaaggagcacccacacgtgaatctgcggatctacgtggccagactgtactatcacgaggaggagaggtatcaggagggcctgaggaacctgaggcgctccggcgtgtctatcagagtgatggacctgcccgatttcgagcactgctgggagacattcgtggataacggaggaggacctttccagccatggcccggcctggaggagctgaatagcaagcagctgtcccggagactgcaggcaggaatcctgggcctgcccccttgtctgaatatcctgaggcgcaagcagccccagctgacatttttcaccatcgcactgcagagttgtcattatcagcgactgcctcctcatatcctgtgggctacaggccttaaa

SEQ ID NO: 3720 - DNA, 684 bp, synthetic construct
  source 1..684: mol_type = other DNA
agcagcgagaccggacctgtggcagtggacccaaccctgagaagacgcattgagccatttcattttcagtttaacaacgaccccagagcctaccggagaaagacctacctgtgctatgagctgaagcaggacggctccacctgggtgctggatcggacactgagaaacaagggccggcacgccgagatctgtttcctggacaagatcaattcctgggagaggctggatcccgcccagcactaccgcgtgacatggtatatgagctggtccccttgctctaactgtgcccagcaggtggtggatttcctgaaggagcacccacacgtgaatctgcggatctttgccgccagactgtactatcacgagcagaggcgctatcaggagggcctgcggagcctgaggggaagcggagtgcctgtggccgtgatgaccctgccagacttcgagcactgctgggagacatttgtggatcacggcggccggccattccagccatgggacggcctggaggagctgaactctaggagcctgtcccggagactgcaggcaggaatcctgggcctgcccccttgtctgaatatcctgaggcgcaagcagccccagctgaccttttttaccatcgcactgcagagttgtcactaccagagactgcctcctcatatcctgtgggctacaggccttaaa

SEQ ID NO: 3721 - DNA, 5559 bp, synthetic construct
  source 1..5559: mol_type = other DNA
atgaaacggacagccgacggaagcgagttcgagtcaccaaagaagaagcggaaagtctcctcagagactgggcctgtcgccgtcgatccaaccctgcgccgccggattgaacctcacgagtttgaagtgttctttgacccccgggagctgagaaaggagacatgcctgctgtacgagatcaactggggaggcaggcactccatctggaggcacacctctcagaacacaaataagcacgtggaggtgaacttcatcgagaagtttaccacagagcggtacttctgccccaataccagatgtagcatcacatggtttctgagctggtccccttgcggagagtgtagcagggccatcaccgagttcctgtccagatatccacacgtgacactgtttatctacatcgccaggctgtatcaccacgcagacccaaggaataggcagggcctgcgcgatctgatcagctccggcgtgaccatccagatcatgacagagcaggagtccggctactgctggcggaacttcgtgaattattctcctagcaacgaggcccactggcctaggtacccacacctgtgggtgcgcctgtacgtgctggagctgtattgcatcatcctgggcctgcccccttgtctgaatatcctgcggagaaagcagccccagctgaccttctttacaatcgccctgcagtcttgtcactatcagaggctgccaccccacatcctgtgggccacaggcctgaagtctggaggatctagcggaggatcctctggcagcgagacaccaggaacaagcgagtcagcaacaccagagagcagtggcggcagcagcggcggcagcgacaagaagtacagcatcggcctggacatcggcaccaactctgtgggctgggccgtgatcaccgacgagtacaaggtgcccagcaagaaattcaaggtgctgggcaacaccgaccggcacagcatcaagaagaacctgatcggagccctgctgttcgacagcggcgaaacagccgaggccacccggctgaagagaaccgccagaagaagatacaccagacggaagaaccggatctgctatctgcaagagatcttcagcaacgagatggccaaggtggacgacagcttcttccacagactggaagagtccttcctggtggaagaggataagaagcacgagcggcaccccatcttcggcaacatcgtggacgaggtggcctaccacgagaagtaccccaccatctaccacctgagaaagaaactggtggacagcaccgacaaggccgacctgcggctgatctatctggccctggcccacatgatcaagttccggggccacttcctgatcgagggcgacctgaaccccgacaacagcgacgtggacaagctgttcatccagctggtgcagacctacaaccagctgttcgaggaaaaccccatcaacgccagcggcgtggacgccaaggccatcctgtctgccagactgagcaagagcagacggctggaaaatctgatcgcccagctgcccggcgagaagaagaatggcctgttcggaaacctgattgccctgagcctgggcctgacccccaacttcaagagcaacttcgacctggccgaggatgccaaactgcagctgagcaaggacacctacgacgacgacctggacaacctgctggcccagatcggcgaccagtacgccgacctgtttctggccgccaagaacctgtccgacgccatcctgctgagcgacatcctgagagtgaacaccgagatcaccaaggcccccctgagcgcctctatgatcaagagatacgacgagcaccaccaggacctgaccctgctgaaagctctcgtgcggcagcagctgcctgagaagtacaaagagattttcttcgaccagagcaagaacggctacgccggctacattgacggcggagccagccaggaagagttctacaagttcatcaagcccatcctggaaaagatggacggcaccgaggaactgctcgtgaagctgaacagagaggacctgctgcggaagcagcggaccttcgacaacggcagcatcccccaccagatccacctgggagagctgcacgccattctgcggcggcaggaagatttttacccattcctgaaggacaaccgggaaaagatcgagaagatcctgaccttccgcatcccctactacgtgggccctctggccaggggaaacagcagattcgcctggatgaccagaaagagcgaggaaaccatcaccccctggaacttcgaggaagtggtggacaagggcgcttccgcccagagcttcatcgagcggatgaccaacttcgataagaacctgcccaacgagaaggtgctgcccaagcacagcctgctgtacgagtacttcaccgtgtataacgagctgaccaaagtgaaatacgtgaccgagggaatgagaaagcccgccttcctgagcggcgagcagaaaaaggccatcgtggacctgctgttcaagaccaaccggaaagtgaccgtgaagcagctgaaagaggactacttcaagaaaatcgagtgcttcgactccgtggaaatctccggcgtggaagatcggttcaacgcctccctgggcacataccacgatctgctgaaaattatcaaggacaaggacttcctggacaatgaggaaaacgaggacattctggaagatatcgtgctgaccctgacactgtttgaggacagagagatgatcgaggaacggctgaaaacctatgcccacctgttcgacgacaaagtgatgaagcagctgaagcggcggagatacaccggctggggcaggctgagccggaagctgatcaacggcatccgggacaagcagtccggcaagacaatcctggatttcctgaagtccgacggcttcgccaacagaaacttcatgcagctgatccacgacgacagcctgacctttaaagaggacatccagaaagcccaggtgtccggccagggcgatagcctgcacgagcacattgccaatctggccggcagccccgccattaagaagggcatcctgcagacagtgaaggtggtggacgagctcgtgaaagtgatgggccggcacaagcccgagaacatcgtgatcgaaatggccagagagaaccagaccacccagaagggacagaagaacagccgcgagagaatgaagcggatcgaagagggcatcaaagagctgggcagccagatcctgaaagaacaccccgtggaaaacacccagctgcagaacgagaagctgtacctgtactacctgcagaatgggcgggatatgtacgtggaccaggaactggacatcaaccggctgtccgactacgatgtggaccatatcgtgcctcagagctttctgaaggacgactccatcgacaacaaggtgctgaccagaagcgacaagaaccggggcaagagcgacaacgtgccctccgaagaggtcgtgaagaagatgaagaactactggcggcagctgctgaacgccaagctgattacccagagaaagttcgacaatctgaccaaggccgagagaggcggcctgagcgaactggataaggccggcttcatcaagagacagctggtggaaacccggcagatcacaaagcacgtggcacagatcctggactcccggatgaacactaagtacgacgagaatgacaagctgatccgggaagtgaaagtgatcaccctgaagtccaagctggtgtccgatttccggaaggatttccagttttacaaagtgcgcgagatcaacaactaccaccacgcccacgacgcctacctgaacgccgtcgtgggaaccgccctgatcaaaaagtaccctaagctggaaagcgagttcgtgtacggcgactacaaggtgtacgacgtgcggaagatgatcgccaagagcgagcaggaaatcggcaaggctaccgccaagtacttcttctacagcaacatcatgaactttttcaagaccgagattaccctggccaacggcgagatccggaagcggcctctgatcgagacaaacggcgaaaccggggagatcgtgtgggataagggccgggattttgccaccgtgcggaaagtgctgagcatgccccaagtgaatatcgtgaaaaagaccgaggtgcagacaggcggcttcagcaaagagtctatcctgcccaagaggaacagcgataagctgatcgccagaaagaaggactgggaccctaagaagtacggcggcttcgacagccccaccgtggcctattctgtgctggtggtggccaaagtggaaaagggcaagtccaagaaactgaagagtgtgaaagagctgctggggatcaccatcatggaaagaagcagcttcgagaagaatcccatcgactttctggaagccaagggctacaaagaagtgaaaaaggacctgatcatcaagctgcctaagtactccctgttcgagctggaaaacggccggaagagaatgctggcctctgccggcgaactgcagaagggaaacgaactggccctgccctccaaatatgtgaacttcctgtacctggccagccactatgagaagctgaagggctcccccgaggataatgagcagaaacagctgtttgtggaacagcacaagcactacctggacgagatcatcgagcagatcagcgagttctccaagagagtgatcctggccgacgctaatctggacaaagtgctgtccgcctacaacaagcaccgggataagcccatcagagagcaggccgagaatatcatccacctgtttaccctgaccaatctgggagcccctgccgccttcaagtactttgacaccaccatcgaccggaagaggtacaccagcaccaaagaggtgctggacgccaccctgatccaccagagcatcaccggcctgtacgagacacggatcgacctgtctcagctgggaggtgacagcggcgggagcggcgggagcggggggagcactaatctgagcgacatcattgagaaggagactgggaaacagctggtcattcaggagtccatcctgatgctgcctgaggaggtggaggaagtgatcggcaacaagccagagtctgacatcctggtgcacaccgcctacgacgagtccacagatgagaatgtgatgctgctgacctctgacgcccccgagtataagccttgggccctggtcatccaggattctaacggcgagaataagatcaagatgctgagcggaggatccggaggatctggaggcagcaccaacctgtctgacatcatcgagaaggagacaggcaagcagctggtcatccaggagagcatcctgatgctgcccgaagaagtcgaagaagtgatcggaaacaagcctgagagcgatatcctggtccataccgcctacgacgagagtaccgacgaaaatgtgatgctgctgacatccgacgccccagagtataagccctgggctctggtcatccaggattccaacggagagaacaaaatcaaaatgctgtctggcggctcaaaaagaaccgccgacggcagcgaattcgagcccaagaagaagaggaaagtc

SEQ ID NO: 3722 - DNA, 5559 bp, synthetic construct
  source 1..5559: mol_type = other DNA
atgaaacggacagccgacggaagcgagttcgagtcaccaaagaagaagcggaaagtcagcagtgaaaccggaccagtggcagtggacccaaccctgaggagacggattgagccccatgaatttgaagtgttctttgacccaagggagctgaggaaggagacatgcctgctgtacgagatcaagtggggcacaagccacaagatctggcgccacagctccaagaacaccacaaagcacgtggaagtgaatttcatcgagaagtttacctccgagcggcacttctgcccctctaccagctgttccatcacatggtttctgtcttggagcccttgcggcgagtgttccaaggccatcaccgagttcctgtctcagcaccctaacgtgaccctggtcatctacgtggcccggctgtatcaccacatggaccagcagaacaggcagggcctgcgcgatctggtgaattctggcgtgaccatccagatcatgacagccccagagtacgactattgctggcggaacttcgtgaattatccacctggcaaggaggcacactggccaagatacccacccctgtggatgaagctgtatgcactggagctgcacgcaggaatcctgggcctgcctccatgtctgaatatcctgcggagaaagcagccccagctgacatttttcaccattgctctgcagtcttgtcactatcagcggctgcctcctcatattctgtgggctacaggccttaaatctggaggatctagcggaggatcctctggcagcgagacaccaggaacaagcgagtcagcaacaccagagagcagtggcggcagcagcggcggcagcgacaagaagtacagcatcggcctggacatcggcaccaactctgtgggctgggccgtgatcaccgacgagtacaaggtgcccagcaagaaattcaaggtgctgggcaacaccgaccggcacagcatcaagaagaacctgatcggagccctgctgttcgacagcggcgaaacagccgaggccacccggctgaagagaaccgccagaagaagatacaccagacggaagaaccggatctgctatctgcaagagatcttcagcaacgagatggccaaggtggacgacagcttcttccacagactggaagagtccttcctggtggaagaggataagaagcacgagcggcaccccatcttcggcaacatcgtggacgaggtggcctaccacgagaagtaccccaccatctaccacctgagaaagaaactggtggacagcaccgacaaggccgacctgcggctgatctatctggccctggcccacatgatcaagttccggggccacttcctgatcgagggcgacctgaaccccgacaacagcgacgtggacaagctgttcatccagctggtgcagacctacaaccagctgttcgaggaaaaccccatcaacgccagcggcgtggacgccaaggccatcctgtctgccagactgagcaagagcagacggctggaaaatctgatcgcccagctgcccggcgagaagaagaatggcctgttcggaaacctgattgccctgagcctgggcctgacccccaacttcaagagcaacttcgacctggccgaggatgccaaactgcagctgagcaaggacacctacgacgacgacctggacaacctgctggcccagatcggcgaccagtacgccgacctgtttctggccgccaagaacctgtccgacgccatcctgctgagcgacatcctgagagtgaacaccgagatcaccaaggcccccctgagcgcctctatgatcaagagatacgacgagcaccaccaggacctgaccctgctgaaagctctcgtgcggcagcagctgcctgagaagtacaaagagattttcttcgaccagagcaagaacggctacgccggctacattgacggcggagccagccaggaagagttctacaagttcatcaagcccatcctggaaaagatggacggcaccgaggaactgctcgtgaagctgaacagagaggacctgctgcggaagcagcggaccttcgacaacggcagcatcccccaccagatccacctgggagagctgcacgccattctgcggcggcaggaagatttttacccattcctgaaggacaaccgggaaaagatcgagaagatcctgaccttccgcatcccctactacgtgggccctctggccaggggaaacagcagattcgcctggatgaccagaaagagcgaggaaaccatcaccccctggaacttcgaggaagtggtggacaagggcgcttccgcccagagcttcatcgagcggatgaccaacttcgataagaacctgcccaacgagaaggtgctgcccaagcacagcctgctgtacgagtacttcaccgtgtataacgagctgaccaaagtgaaatacgtgaccgagggaatgagaaagcccgccttcctgagcggcgagcagaaaaaggccatcgtggacctgctgttcaagaccaaccggaaagtgaccgtgaagcagctgaaagaggactacttcaagaaaatcgagtgcttcgactccgtggaaatctccggcgtggaagatcggttcaacgcctccctgggcacataccacgatctgctgaaaattatcaaggacaaggacttcctggacaatgaggaaaacgaggacattctggaagatatcgtgctgaccctgacactgtttgaggacagagagatgatcgaggaacggctgaaaacctatgcccacctgttcgacgacaaagtgatgaagcagctgaagcggcggagatacaccggctggggcaggctgagccggaagctgatcaacggcatccgggacaagcagtccggcaagacaatcctggatttcctgaagtccgacggcttcgccaacagaaacttcatgcagctgatccacgacgacagcctgacctttaaagaggacatccagaaagcccaggtgtccggccagggcgatagcctgcacgagcacattgccaatctggccggcagccccgccattaagaagggcatcctgcagacagtgaaggtggtggacgagctcgtgaaagtgatgggccggcacaagcccgagaacatcgtgatcgaaatggccagagagaaccagaccacccagaagggacagaagaacagccgcgagagaatgaagcggatcgaagagggcatcaaagagctgggcagccagatcctgaaagaacaccccgtggaaaacacccagctgcagaacgagaagctgtacctgtactacctgcagaatgggcgggatatgtacgtggaccaggaactggacatcaaccggctgtccgactacgatgtggaccatatcgtgcctcagagctttctgaaggacgactccatcgacaacaaggtgctgaccagaagcgacaagaaccggggcaagagcgacaacgtgccctccgaagaggtcgtgaagaagatgaagaactactggcggcagctgctgaacgccaagctgattacccagagaaagttcgacaatctgaccaaggccgagagaggcggcctgagcgaactggataaggccggcttcatcaagagacagctggtggaaacccggcagatcacaaagcacgtggcacagatcctggactcccggatgaacactaagtacgacgagaatgacaagctgatccgggaagtgaaagtgatcaccctgaagtccaagctggtgtccgatttccggaaggatttccagttttacaaagtgcgcgagatcaacaactaccaccacgcccacgacgcctacctgaacgccgtcgtgggaaccgccctgatcaaaaagtaccctaagctggaaagcgagttcgtgtacggcgactacaaggtgtacgacgtgcggaagatgatcgccaagagcgagcaggaaatcggcaaggctaccgccaagtacttcttctacagcaacatcatgaactttttcaagaccgagattaccctggccaacggcgagatccggaagcggcctctgatcgagacaaacggcgaaaccggggagatcgtgtgggataagggccgggattttgccaccgtgcggaaagtgctgagcatgccccaagtgaatatcgtgaaaaagaccgaggtgcagacaggcggcttcagcaaagagtctatcctgcccaagaggaacagcgataagctgatcgccagaaagaaggactgggaccctaagaagtacggcggcttcgacagccccaccgtggcctattctgtgctggtggtggccaaagtggaaaagggcaagtccaagaaactgaagagtgtgaaagagctgctggggatcaccatcatggaaagaagcagcttcgagaagaatcccatcgactttctggaagccaagggctacaaagaagtgaaaaaggacctgatcatcaagctgcctaagtactccctgttcgagctggaaaacggccggaagagaatgctggcctctgccggcgaactgcagaagggaaacgaactggccctgccctccaaatatgtgaacttcctgtacctggccagccactatgagaagctgaagggctcccccgaggataatgagcagaaacagctgtttgtggaacagcacaagcactacctggacgagatcatcgagcagatcagcgagttctccaagagagtgatcctggccgacgctaatctggacaaagtgctgtccgcctacaacaagcaccgggataagcccatcagagagcaggccgagaatatcatccacctgtttaccctgaccaatctgggagcccctgccgccttcaagtactttgacaccaccatcgaccggaagaggtacaccagcaccaaagaggtgctggacgccaccctgatccaccagagcatcaccggcctgtacgagacacggatcgacctgtctcagctgggaggtgacagcggcgggagcggcgggagcggggggagcactaatctgagcgacatcattgagaaggagactgggaaacagctggtcattcaggagtccatcctgatgctgcctgaggaggtggaggaagtgatcggcaacaagccagagtctgacatcctggtgcacaccgcctacgacgagtccacagatgagaatgtgatgctgctgacctctgacgcccccgagtataagccttgggccctggtcatccaggattctaacggcgagaataagatcaagatgctgagcggaggatccggaggatctggaggcagcaccaacctgtctgacatcatcgagaaggagacaggcaagcagctggtcatccaggagagcatcctgatgctgcccgaagaagtcgaagaagtgatcggaaacaagcctgagagcgatatcctggtccataccgcctacgacgagagtaccgacgaaaatgtgatgctgctgacatccgacgccccagagtataagccctgggctctggtcatccaggattccaacggagagaacaaaatcaaaatgctgtctggcggctcaaaaagaaccgccgacggcagcgaattcgagcccaagaagaagaggaaagtc

SEQ ID NO: 3723 - DNA, 5559 bp, synthetic construct
  source 1..5559: mol_type = other DNA
atgaaacggacagccgacggaagcgagttcgagtcaccaaagaagaagcggaaagtctcatcagaaacaggaccagtcgccgtggacccaacactgaggagaaggattgagccccatgaatttgaagtctttttcgaccccagggagctgaggaaggaggcatgcctgctgtacgagatcaagtggggcacaagccacaagatctggcgcaacagcggcaagaacaccacaaagcacgtggaagtgaatttcatcgagaagtttacctccgagcggcacttctgcccctctatcagctgttccatcacatggtttctgtcttggagcccttgctgggagtgttccaaggccatccgcgagttcctgtctcagcaccctaacgtgaccctggtcatctacgtggcccggctgtttcaacacatggaccagcagaacaggcagggcctgcgcgatctggtgaattctggcgtgaccatccagatcatgacagcctcagagtacgaccattgctggcggaacttcgtgaattatccacctggcaaggaggcacactggccaagatacccacccctgtggatgaagctgtatgcactggagctgcacgcaggaatcctgggcctgcctccatgtctgaatatcctgcggagaaagcagccccagctgacatttttcactatcgcactgcagagctgtcattaccagagactgcctcctcatatcctgtgggctacaggccttaaatctggaggatctagcggaggatcctctggcagcgagacaccaggaacaagcgagtcagcaacaccagagagcagtggcggcagcagcggcggcagcgacaagaagtacagcatcggcctggacatcggcaccaactctgtgggctgggccgtgatcaccgacgagtacaaggtgcccagcaagaaattcaaggtgctgggcaacaccgaccggcacagcatcaagaagaacctgatcggagccctgctgttcgacagcggcgaaacagccgaggccacccggctgaagagaaccgccagaagaagatacaccagacggaagaaccggatctgctatctgcaagagatcttcagcaacgagatggccaaggtggacgacagcttcttccacagactggaagagtccttcctggtggaagaggataagaagcacgagcggcaccccatcttcggcaacatcgtggacgaggtggcctaccacgagaagtaccccaccatctaccacctgagaaagaaactggtggacagcaccgacaaggccgacctgcggctgatctatctggccctggcccacatgatcaagttccggggccacttcctgatcgagggcgacctgaaccccgacaacagcgacgtggacaagctgttcatccagctggtgcagacctacaaccagctgttcgaggaaaaccccatcaacgccagcggcgtggacgccaaggccatcctgtctgccagactgagcaagagcagacggctggaaaatctgatcgcccagctgcccggcgagaagaagaatggcctgttcggaaacctgattgccctgagcctgggcctgacccccaacttcaagagcaacttcgacctggccgaggatgccaaactgcagctgagcaaggacacctacgacgacgacctggacaacctgctggcccagatcggcgaccagtacgccgacctgtttctggccgccaagaacctgtccgacgccatcctgctgagcgacatcctgagagtgaacaccgagatcaccaaggcccccctgagcgcctctatgatcaagagatacgacgagcaccaccaggacctgaccctgctgaaagctctcgtgcggcagcagctgcctgagaagtacaaagagattttcttcgaccagagcaagaacggctacgccggctacattgacggcggagccagccaggaagagttctacaagttcatcaagcccatcctggaaaagatggacggcaccgaggaactgctcgtgaagctgaacagagaggacctgctgcggaagcagcggaccttcgacaacggcagcatcccccaccagatccacctgggagagctgcacgccattctgcggcggcaggaagatttttacccattcctgaaggacaaccgggaaaagatcgagaagatcctgaccttccgcatcccctactacgtgggccctctggccaggggaaacagcagattcgcctggatgaccagaaagagcgaggaaaccatcaccccctggaacttcgaggaagtggtggacaagggcgcttccgcccagagcttcatcgagcggatgaccaacttcgataagaacctgcccaacgagaaggtgctgcccaagcacagcctgctgtacgagtacttcaccgtgtataacgagctgaccaaagtgaaatacgtgaccgagggaatgagaaagcccgccttcctgagcggcgagcagaaaaaggccatcgtggacctgctgttcaagaccaaccggaaagtgaccgtgaagcagctgaaagaggactacttcaagaaaatcgagtgcttcgactccgtggaaatctccggcgtggaagatcggttcaacgcctccctgggcacataccacgatctgctgaaaattatcaaggacaaggacttcctggacaatgaggaaaacgaggacattctggaagatatcgtgctgaccctgacactgtttgaggacagagagatgatcgaggaacggctgaaaacctatgcccacctgttcgacgacaaagtgatgaagcagctgaagcggcggagatacaccggctggggcaggctgagccggaagctgatcaacggcatccgggacaagcagtccggcaagacaatcctggatttcctgaagtccgacggcttcgccaacagaaacttcatgcagctgatccacgacgacagcctgacctttaaagaggacatccagaaagcccaggtgtccggccagggcgatagcctgcacgagcacattgccaatctggccggcagccccgccattaagaagggcatcctgcagacagtgaaggtggtggacgagctcgtgaaagtgatgggccggcacaagcccgagaacatcgtgatcgaaatggccagagagaaccagaccacccagaagggacagaagaacagccgcgagagaatgaagcggatcgaagagggcatcaaagagctgggcagccagatcctgaaagaacaccccgtggaaaacacccagctgcagaacgagaagctgtacctgtactacctgcagaatgggcgggatatgtacgtggaccaggaactggacatcaaccggctgtccgactacgatgtggaccatatcgtgcctcagagctttctgaaggacgactccatcgacaacaaggtgctgaccagaagcgacaagaaccggggcaagagcgacaacgtgccctccgaagaggtcgtgaagaagatgaagaactactggcggcagctgctgaacgccaagctgattacccagagaaagttcgacaatctgaccaaggccgagagaggcggcctgagcgaactggataaggccggcttcatcaagagacagctggtggaaacccggcagatcacaaagcacgtggcacagatcctggactcccggatgaacactaagtacgacgagaatgacaagctgatccgggaagtgaaagtgatcaccctgaagtccaagctggtgtccgatttccggaaggatttccagttttacaaagtgcgcgagatcaacaactaccaccacgcccacgacgcctacctgaacgccgtcgtgggaaccgccctgatcaaaaagtaccctaagctggaaagcgagttcgtgtacggcgactacaaggtgtacgacgtgcggaagatgatcgccaagagcgagcaggaaatcggcaaggctaccgccaagtacttcttctacagcaacatcatgaactttttcaagaccgagattaccctggccaacggcgagatccggaagcggcctctgatcgagacaaacggcgaaaccggggagatcgtgtgggataagggccgggattttgccaccgtgcggaaagtgctgagcatgccccaagtgaatatcgtgaaaaagaccgaggtgcagacaggcggcttcagcaaagagtctatcctgcccaagaggaacagcgataagctgatcgccagaaagaaggactgggaccctaagaagtacggcggcttcgacagccccaccgtggcctattctgtgctggtggtggccaaagtggaaaagggcaagtccaagaaactgaagagtgtgaaagagctgctggggatcaccatcatggaaagaagcagcttcgagaagaatcccatcgactttctggaagccaagggctacaaagaagtgaaaaaggacctgatcatcaagctgcctaagtactccctgttcgagctggaaaacggccggaagagaatgctggcctctgccggcgaactgcagaagggaaacgaactggccctgccctccaaatatgtgaacttcctgtacctggccagccactatgagaagctgaagggctcccccgaggataatgagcagaaacagctgtttgtggaacagcacaagcactacctggacgagatcatcgagcagatcagcgagttctccaagagagtgatcctggccgacgctaatctggacaaagtgctgtccgcctacaacaagcaccgggataagcccatcagagagcaggccgagaatatcatccacctgtttaccctgaccaatctgggagcccctgccgccttcaagtactttgacaccaccatcgaccggaagaggtacaccagcaccaaagaggtgctggacgccaccctgatccaccagagcatcaccggcctgtacgagacacggatcgacctgtctcagctgggaggtgacagcggcgggagcggcgggagcggggggagcactaatctgagcgacatcattgagaaggagactgggaaacagctggtcattcaggagtccatcctgatgctgcctgaggaggtggaggaagtgatcggcaacaagccagagtctgacatcctggtgcacaccgcctacgacgagtccacagatgagaatgtgatgctgctgacctctgacgcccccgagtataagccttgggccctggtcatccaggattctaacggcgagaataagatcaagatgctgagcggaggatccggaggatctggaggcagcaccaacctgtctgacatcatcgagaaggagacaggcaagcagctggtcatccaggagagcatcctgatgctgcccgaagaagtcgaagaagtgatcggaaacaagcctgagagcgatatcctggtccataccgcctacgacgagagtaccgacgaaaatgtgatgctgctgacatccgacgccccagagtataagccctgggctctggtcatccaggattccaacggagagaacaaaatcaaaatgctgtctggcggctcaaaaagaaccgccgacggcagcgaattcgagcccaagaagaagaggaaagtc

SEQ ID NO: 3724 - protein, 228 aa, synthetic construct
SSETGPVAVDPTLRRRIEPHEFEVFFDPRELRKETCLLYEINWGGRHSIWRHTSQNTNKHVEVNFIEKFTTERYFCPNTRCSITWFLSWSPCGECSRAITEFLSRYPHVTLFIYIARLYHHADPRNRQGLRDLISSGVTIQIMTEQESGYCWRNFVNYSPSNEAHWPRYPHLWVRLYVLELYCIILGLPPCLNILRRKQPQLTFFTIALQSCHYQRLPPHILWATGLK

SEQ ID NO: 3725 - protein, 228 aa, synthetic construct
SSETGPVAVDPTLRRRIEPEFFNRNYDPRELRKETYLLYEIKWGKESKIWRHTSNNRTQHAEVNFLENFFNELYFNPSTHCSITWFLSWSPCGECSKAIVEFLKEHPNVNLEIYVARLYLCEDERNRQGLRDLVNSGVTIRIMNLPDYNYCWRTFVSHQGGDEDYWPRHFAPWVRLYVLELYCIILGLPPCLNILRRKQPQLTFFTIALQSCHYQRLPPHILWATGLK

SEQ ID NO: 3726 - protein, 384 aa, synthetic construct
MKPHFRNTVERMYRDTFSYNFYNRPILSRRNTVWLCYEVKTKGPSRPPLDAKIFRGQVYSELKYHPEMRFFHWFSKWRKLHRDQEYEVTWYISWSPCTKCTRDMATFLAEDPKVTLTIFVARLYYFWDPDYQEALRSLCQKRDGPRATMKIMNYDEFQHCWSKFVYSQRELFEPWNNLPKYYILLHIMLGEILRHSMDPPTFTFNFNNEPWVRGRHETYLCYEVERMHNDTWVLLNQRRGFLCNQAPHKHGFLEGRHAELCFLDVIPFWKLDLDQDYRVTCFTSWSPCFSCAQEMAKFISKNKHVSLCIFTARIYRRQGRCQEGLRTLAEAGAKISIMTYSEFKHCWDTFVDHQGCPFQPWDGLDEHSQDLSGRLRAILQNQEN

SEQ ID NO: 3727 - protein, 184 aa, synthetic construct
MDPPTFTFNFNNEPWVRGRHETYLCYEVERMHNDTWVLLNQRRGFLCNQAPHKHGFLEGRHAELCFLDVIPFWKLDLDQDYRVTCFTSWSPCFSCAQEMAKFISKNKHVSLCIFTARIYDDQGRCQEGLRTLAEAGAKISIMTYSEFKHCWDTFVDHQGCPFQPWDGLDEHSQDLSGRLRAILQ

SEQ ID NO: 3728 - protein, 184 aa, synthetic construct
MDPPTFTFNFNNEPWVRGRHETYLCYEVERMHNDTWVLLNQRRGFLCNQAPHKHGFLEGRHAELCFLDVIPFWKLDLDQDYRVTCFTSWSPCFSCAQEMAKFISKNKHVSLCIFTARIYRRQGRCQEGLRTLAEAGAKISIMTYSEFKHCWDTFVDHQGCPFQPWDGLDEHSQDLSGRLRAILQ

SEQ ID NO: 3729 - protein, 428 aa, Mus sp.
MGPFCLGCSHRKCYSPIRNLISQETFKFHFKNLGYAKGRKDTFLCYEVYRKOCOSPVSLHHGVFKNKONIHAEICFLYWFHDKVLKVLSPREEFKITWYMSWSPCFECAEQIVRFLATHHNLSLDIFSSRLYNVQDPETQQNLCRLVQEGAQVAAMDLYEFKKCWKKFVDNGGRRFRPWKRLLTNFRYQDSKLQEILRPCYIPVPSSSSSTLSNICLTKGLPETRFCVEGRRMDPLSEEEFYSQFYNQRVKHLCYYHRMKPYLCYQLEQFNGQAPLKGCLLSEKGKQHAEILFLDKIRSMELSQVTITCYLTWSPCPNCAWQLAAFKRORPOULHIATSRLYFHWKRPFQKGLCSLWQSGILVDVMDLPQFTDCWTNFVNPKRPFWPWKGLEIISRRTQRRLRRIKESWGLQDLVNDFGNLQLGPPMS

SEQ ID NO: 3730 - protein, 429 aa, Rattus sp.
MGPFCLGCSHRKCYSPIRNLISQETFKFHFKNLRYAIDRKDTFLCYEVTRKDCDSPVSLHHGVFKNKDNIHAEICFLYWFHDKVLKVLSPREEFKITWYMSWSPCFECAEQVLRFLATHHNLSLDIFSSRLYNIRDPENQQNLCRLVQEGAQVAAMDLYEFKKCWKKFVDNGGRRFRPWKKLLTNFRYQDSKLQEILRPCYIPVPSSSSSTLSNICLTKGLPETRFCVERRRVHLLSEEEFYSQFYNQRVKHLCYYHGVKPYLCYQLEQFNGQAPLKGCLLSEKGKQHAEILFLDKIRSMELSQVIITCYLTWSPCPNCAWQLAAFKRDRPDLILHIYTSRLYFHWKRPFQKGLCSLWQSGILVDVMDLPQFTDCWTNFVNPKRPFWPWKGLEIISRRTQRRLHRIKESWGLQDLVNDFGNLQLGPPMS

SEQ ID NO: 3731 - protein, 370 aa, Macaca mulatta; identical to SEQ ID NO: 33

SEQ ID NO: 3732 - protein, 384 aa, Pan troglodytes; identical to SEQ ID NO: 34

SEQ ID NO: 3733 - protein, 377 aa, Chlorocebus sabaeus; identical to SEQ ID NO: 35

SEQ ID NO: 3734 - protein, 384 aa, Homo sapiens; identical to SEQ ID NO: 36

SEQ ID NO: 3735 - protein, 373 aa, Homo sapiens; identical to SEQ ID NO: 32

SEQ ID NO: 3736 - protein, 382 aa, Homo sapiens; identical to SEQ ID NO: 37

SEQ ID NO: 3737 - protein, 396 aa, Rattus sp.
MQPQGLGPNAGMGPVCLGCSHRRPYSPIRNPLKKLYQQTFYFHFKNVRYAWGRKNNFLCYEVNGMDCALPVPLRQGVFRKQGHIHAELCFIYWFHDKVLRVLSPMEEFKVTWYMSWSPCSKCAEQVARFLAAHRNLSLAIFSSRLYYYLRNPNYQQKLCRLIQEGVHVAAMDLPEFKKCWNKFVDNDGQPFRPWMRLRINFSFYDCKLQEIFSRMNLLREDVFYLQFNNSHRVKPVQNRYYRRKSYLCYQLERANGQEPLKGYLLYKKGEQHVEILFLEKMRSMELSQVRITCYLTWSPCPNCARQLAAFKKDHPDLILRIYTSRLYFYWRKKFQKGLCTLWRSGIHVDVMDLPQFADCWTNFVNPQRPFRPWNELEKNSWRIQRRLRRIKESWGL

SEQ ID NO: 3738 - protein, 227 aa, Bos sp.
DGWEVAFRSGTVLKAGVLGVSMTEGWAGSGHPGQGACVWTPGTRNTMNLLREVLFKQQFGNQPRVPAPYYRRKTYLCYQLKQRNDLTLDRGCFRNKKQRHAEIRFIDKINSLDLNPSQSYKIICYITWSPCPNCANELVNFITRNNHLKLEIFASRLYFHWIKSFKMGLQDLQNAGISVAVMTHTEFEDCWEQFVDNQSRPFQPWDKLEQYSASIRRRLQRILTAPI

SEQ ID NO: 3739 - protein, 490 aa, Pan troglodytes; identical to SEQ ID NO: 40

SEQ ID NO: 3740 - protein, 190 aa, Gorilla sp.
MNPQIRNPMKAMYPGTFYFQFKNLWEANDRNETWLCFTVEGIKRRSVVSWKTGVFRNQVDSETHCHAERCFLSWFCDDILSPNTNYQVTWYTSWSPCPECAGEVAEFLARHSNVNLTIFTARLYYFQDTDYQEGLRSLSQEGVAVKIMDYKDFKYCWENFVYNDDEPFKPWKGLKYNFRFLKRRLQEILE

SEQ ID NO: 3741 - protein, 199 aa, Homo sapiens
MEASPASGPRHLMDPHIFTSNFNNGIGRHKTYLCYEVERLDNGTSVKMOQHRGEEHNQAKNEECGEAGRHAELRFLDLVPSLQLDPAQIYRVTWFISWSPCFSWGCAGEVRAFLQENTHVRLRIFAARIYDYDPLYKEALQMLRDAGAQVSIMTYDEFKHCWDTFVDHQGCPFQPWDGLDEHSQALSGRLRAILQNQGN

SEQ ID NO: 3742 - protein, 202 aa, Macaca mulatta
MDGSPASRPRHLMDPNTFTFNFNNDLSVRGRHQTYLCYEVERLDNGTWVPMDERRGEECNKAKNNPCGOAGCHVELRFLCEVPSWQLDPAQTYRVTWFISWSPCERRGCAGQVRVFLQENKHVRLRIFAARIYDYDPLYQEALRTLRDAGAQVSIMTYEEFKHCWDTFVDRQGRPFQPWDGLDEHSQALSGRLRAILQNQGN

SEQ ID NO: 3743 - protein, 184 aa, Bos sp.
MDEYTFTENFNNQGWPSKTYLCYEMERLDGDATIPLDEYKGFVRNKGLDQPEKPCAELYFLGKIHSWNLDRNQHYRLTCFISWSPCAOCAQKEEEEEKENHHISUIIEASRIAEHNRFGCHQSGLCELQAAGARITIMTFEDFKHCWETFVDHKGKPFQPWEGLNVKSQALCTELQAILKTQQN

SEQ ID NO: 3744 - protein, 201 aa, Homo sapiens
MALLTAETFRLQFNNKRRLRRPYYPRKALLCYQLTPQNGSTPTRGYFENKKKCHAEICFINEIKSMGLDETQCYQVTCYLTYVSPCSSCAWEENOEIKAHOHENEGIEASRLYYHWCKPQQKGLRLLCGSQVPVEVMGFPKFADCWENFVDHEKPLSFNPYKMLEELDKNSRAIKRRLERIKIPGVRAQGRYMDILCDAEV

SEQ ID NO: 3745 - protein, 380 aa, Homo sapiens
MNPQIRNPMERMYRDTFYDNFENEPILYGRSYTWLCYEVKIKRGRSNEEWDEGNERGPNEPKRQSNHRQENYERFENHAEMCFLSWFCGNRLPANRRFQITWFVSWPCLPCVVKVTKFLAEHPNVTLTISAARLYYYRDRDWRWVLLRLHKAGARVKIMDYEDFAYCWENFVCNEGQPFMPWYKFDDNYASLHRTLKEILRNPMEAMYPHIFYFHFKNLLKACGRNESWLCFTMEVTKHHSAVFRKRGVFRNQVDPETHCAEPCFLSWFCDDLSPIYPVFEMMWSPCPECAGEVAEFLARHSNVNLTIFTARLCYFWDTDYQEGLCSLSQEGASVKIMGYKDFVSCWKNFVYSDDEPFKPWKGLQTNFRLLKRRLREILQ

SEQ ID NO: 3746 - protein, 228 aa, Rattus sp.
SSETGPVAVDPTLRRRIEPHEFEVFFDPRELRKETCLLYEINWGGRHSIWRHTSQNTNKHVEVNFIEKFTTERYFCPNTRCSRRWFLSWSPCGECSRAITEFLSRYPHVTLFIYIARLYHHADPRNRQGLRDLISSGVTIQIMTEQESGYCWRNFVNYSPSNEAHWPRYPHLWVRLYVLELYCIILGLPPCLNILRRKQPQLTFFTIALQSCHYQRLPPHILWATGLK

SEQ ID NO: 3747 - protein, 228 aa, synthetic construct
SSETGPVAVDPTLRRRIEPHEFEVFFDPRELRKETCLLYEIKWGTSHKIWRHSSKNTTKHVEVNFIEKFTSERHFCPSTSCSITWFLSWSPCGECSKAITEFLSQHPNVTLVIYVARLYHHMDQQNRQGLRDLVNSGVTIQIMTAPEYDYCWRNFVNYPPGKEAHWPRYPPLWMKLYALELHAGILGLPPCLNILRRKQPQLTFFTIALQSCHYQRLPPHILWATGLK

SEQ ID NO: 3748 - protein, 228 aa, synthetic construct
SSETGPVAVDPTLRRRIEPHEFEVFFDPRELRKEACLLYEIKWGTSHKIWRNSGKNTTKHVEVNFIEKFTSERHFCPSISCSITWFLSWSPCWECSKAIREFLSQHPNVTLVIYVARLFQHMDQQNRQGLRDLVNSGVTIQIMTASEYDHCWRNFVNYPPGKEAHWPRYPPLWMKLYALELHAGILGLPPCLNILRRKQPQLTFFTIALQSCHYQRLPPHILWATGLK

SEQ ID NO: 3749 - protein, 228 aa, synthetic construct
SSETGPVAVDPTLRRRIEPEFFNRNYDPRELRKETYLLYEIKWGKESKIWRHTSNNRTQHAEVNFLENFFNELYFNPSTHCSRRWFLSWSPCGECSKAIVEFLKEHPNVNLEIYVARLYLCEDERNRQGLRDLVNSGVTIRIMNLPDYNYCWRTFVSHQGGDEDYWPRHFAPWVRLYVLELYCIILGLPPCLNILRRKQPQLTFFTIALQSCHYQRLPPHILWATGLK

SEQ ID NO: 3750 - protein, 228 aa, synthetic construct
SSETGPVAVDPTLRRRIEPFYFQFNNDPRACRRKTYLCYELKQDGSTWVWKRTLHNKGRHAEICFLEKISSLEKLDPAQHYRITWYMSWSPCSNCAQKIVDFLKEHPHVNLRIYVARLYYHEEERYQEGLRNLRRSGVSIRVMDLPDFEHCWETFVDNGGGPFQPWPGLEELNSKQLSRRLQAGILGLPPCLNILRRKQPQLTFFTIALQSCHYQRLPPHILWATGLK

SEQ ID NO: 3751 - protein, 228 aa, synthetic construct
SSETGPVAVDPTLRRRIEPFHFQFNNDPRAYRRKTYLCYELKQDGSTWVLDRTLRNKGRHAEICFLDKINSWERLDPAQHYRVTWYMSWSPCSNCAQQVVDFLKEHPHVNLRIFAARLYYHEQRRYQEGLRSLRGSGVPVAVMTLPDFEHCWETFVDHGGRPFQPWDGLEELNSRSLSRRLQAGILGLPPCLNILRRKQPQLTFFTIALQSCHYQRLPPHILWATGLK

SEQ ID NO: 3752 - protein, 12 aa, synthetic construct
EGSSSKEEEEPG

SEQ ID NO: 3753 - protein, 10 aa, synthetic construct
NSISSSNGQK

SEQ ID NO: 3754 - protein, 12 aa, synthetic construct
GEEGEGSGGGEK

SEQ ID NO: 3755 - protein, 12 aa, synthetic construct
EGEGGKESGSSE

SEQ ID NO: 3756 - protein, 12 aa, synthetic construct
GGGGSSKSPGSE

SEQ ID NO: 3757 - protein, 8 aa, synthetic construct
PIGSDQDD

SEQ ID NO: 3758 - protein, 10 aa, synthetic construct
TEKGQVPHGS

SEQ ID NO: 3759 - protein, 12 aa, synthetic construct
ESGEGGGGSEKK

SEQ ID NO: 3760 - protein, 12 aa, synthetic construct
EEGKPKEGEGSG

SEQ ID NO: 3761 - protein, 9 aa, synthetic construct
ASREPKDSS

SEQ ID NO: 3762 - protein, 8 aa, synthetic construct
KQGSEHDE

SEQ ID NO: 3763 - protein, 12 aa, synthetic construct
SESKSEKGSSEK

SEQ ID NO: 3764 - protein, 10 aa, synthetic construct
QYDSGERSDQ

SEQ ID NO: 3765 - protein, 10 aa, synthetic construct
PGANEEIPGQ

SEQ ID NO: 3766 - protein, 7 aa, synthetic construct
NSPTDEK

SEQ ID NO: 3767 - protein, 10 aa, synthetic construct
EGANEEIPGQ

SEQ ID NO: 3768 - protein, 12 aa, synthetic construct
EGEKEKKKSGES

SEQ ID NO: 3769 - protein, 10 aa, synthetic construct
PGRHEEVPGQ

SEQ ID NO: 3770 - protein, 10 aa, synthetic construct
SKHQTEQDDS

SEQ ID NO: 3771 - protein, 10 aa, synthetic construct
ESEDDSSGRK

SEQ ID NO: 3772 - protein, 12 aa, synthetic construct
KESEKKESESKS

SEQ ID NO: 3773 - protein, 10 aa, synthetic construct
KGEGKSSIKD

SEQ ID NO: 3774 - protein, 10 aa, synthetic construct
DRSQKQDQQD

SEQ ID NO: 3775 - protein, 8 aa, synthetic construct
GPSSTSSS

SEQ ID NO: 3776 - protein, 12 aa, synthetic construct
GSSGEKEEGEPS

SEQ ID NO: 3777 - protein, 12 aa, synthetic construct
GEPKSKKSGSGS

SEQ ID NO: 3778 - protein, 12 aa, synthetic construct
SSGEGGKSESGP

SEQ ID NO: 3779 - protein, 8 aa, synthetic construct
SPQPTSSD

SEQ ID NO: 3780 - protein, 12 aa, synthetic construct
EGGSEEEEESGS

SEQ ID NO: 3781 - protein, 12 aa, synthetic construct
KGPKPKKEESEK

SEQ ID NO: 3782 - protein, 10 aa, synthetic construct
SKSQQFVTYE

SEQ ID NO: 3783 - protein, 10 aa, synthetic construct
TGNSKYQTGK

SEQ ID NO: 3784 - protein, 10 aa, synthetic construct
PQPIPHTNPT

SEQ ID NO: 3785 - protein, 10 aa, synthetic construct
ANAHSDISTG

SEQ ID NO: 3786 - protein, 10 aa, synthetic construct
KSQQTEDQSK

SEQ ID NO: 3787 - protein, 10 aa, synthetic construct
QSQDQKQKEH

SEQ ID NO: 3788 - protein, 8 aa, synthetic construct
NQQRPSSD

SEQ ID NO: 3789 - protein, 10 aa, synthetic construct
TTKDTSPKPQ

SEQ ID NO: 3790 - protein, 10 aa, synthetic construct
EGKDNQQTGE

SEQ ID NO: 3791 - protein, 8 aa, synthetic construct
EPQPDSSE

SEQ ID NO: 3792 - DNA, 23 bp, synthetic construct
  source 1..23: mol_type = other DNA
gcttacaatgactgagatcttgg

SEQ ID NO: 3793 - DNA, 24 bp, synthetic construct
  source 1..24: mol_type = other DNA
tgcttacaatgactgagatcttgg

SEQ ID NO: 3794 - RNA, 20 nt, synthetic construct
  source 1..20: mol_type = other RNA
caggatccgcacagactcca

SEQ ID NO: 3795 - DNA, 23 bp, synthetic construct
  source 1..23: mol_type = other DNA
caggatccgcacagactccaggg

SEQ ID NO: 3796 - RNA, 20 nt, synthetic construct
  source 1..20: mol_type = other RNA
tccccgttctcgaagtcgtg

SEQ ID NO: 3797 - DNA, 23 bp, synthetic construct
  source 1..23: mol_type = other DNA
tccccgttctcgaagtcgtgtgg

SEQ ID NO: 3798 - DNA, 30 bp, synthetic construct
  source 1..30: mol_type = other DNA
ggggaacaacagaagcggaagatcgtcctg

SEQ ID NO: 3799 - DNA, 30 bp, synthetic construct
  source 1..30: mol_type = other DNA
gtgctgacagcagcacattgtttcactgtg

SEQ ID NO: 3800 - DNA, 30 bp, synthetic construct
  source 1..30: mol_type = other DNA
gaattttatgactatgacgttgccctgatc

SEQ ID NO: 3801 - DNA, 30 bp, synthetic construct
  source 1..30: mol_type = other DNA
ctccttgcaggtgattctggcggccccttg

SEQ ID NO: 3802 - DNA, 33 bp, synthetic construct
  source 1..33: mol_type = other DNA
gtgctagatggatcagacagcattggggccagc

SEQ ID NO: 3803 - DNA, 30 bp, synthetic construct
  source 1..30: mol_type = other DNA
aagttgaagtcagggactaacaccaagaag

SEQ ID NO: 3804 - DNA, 30 bp, synthetic construct
  source 1..30: mol_type = other DNA
tccaacccgggcatccccattggcacaagg

SEQ ID NO: 3805 - DNA, 30 bp, synthetic construct
  source 1..30: mol_type = other DNA
attggcacaaggaaggtgggcagccagtac

SEQ ID NO: 3806 - DNA, 30 bp, synthetic construct
  source 1..30: mol_type = other DNA
cgtggctcccagcggcgaacgtgtcaggaa

SEQ ID NO: 3807 - DNA, 30 bp, synthetic construct; identical to SEQ ID NO: 3798
  source 1..30: mol_type = other DNA

SEQ ID NO: 3808 - DNA, 30 bp, synthetic construct
  source 1..30: mol_type = other DNA
ccttctctgccagatgaaagccagtctctg

SEQ ID NO: 3809 - DNA, 30 bp, synthetic construct
  source 1..30: mol_type = other DNA
cctcaagaggtggccgaagctttcctgtct

SEQ ID NO: 3810 - DNA, 30 bp, synthetic construct
  source 1..30: mol_type = other DNA
atctacctggtgctagatggatcagacagc

SEQ ID NO: 3811 - DNA, 30 bp, synthetic construct
  source 1..30: mol_type = other DNA
atcatcctcatgactgatggtcagaaggga

SEQ ID NO: 3812 - DNA, 30 bp, synthetic construct
  source 1..30: mol_type = other DNA
tcctggcacccaggggaacaacagaagcgg

SEQ ID NO: 3813 - DNA, 30 bp, synthetic construct
  source 1..30: mol_type = other DNA
cccaatacttgcagaggtgattctggcggc